(19) United States
(12) Patent Application Publication
(10) Pub. No.: US 2025/0346913 A1
(43) Pub. Date: Nov. 13, 2025

(54) NOVEL METHODS FOR IDENTIFICATION AND USE OF UPSTREAM OPEN READING FRAMES

(71) Applicant: genXtraits, Inc., Alameda, CA (US)

(72) Inventors: Roger Paul Hellens, Ngongotaha (NZ); Oliver J. Ratcliffe, Alameda, CA (US); Jeffrey M. Libby, Cupertino, CA (US)

(21) Appl. No.: 18/869,644

(22) PCT Filed: May 26, 2023
(86) PCT No.: PCT/US2023/067586

§ 371 Date: Nov. 26, 2024

Related U.S. Application Data
(60) Provisional application No. 63/346,629, filed on May 27, 2022.

(51) Int. Cl. C12N 15/82; C12N 5/04; C12N 5/10; G16B 30/00

(52) U.S. Cl. CPC C12N 15/8216; C12N 5/04; C12N 5/10; C12N 15/8269; G16B 30/00; C12N 2510/00

(57) ABSTRACT

The present description relates to methods and compositions for identifying and characterizing upstream open reading frames (uORFs) in eukaryotes, including plants, and means for using and/or modifying the uORFs to produce desirable traits. In so doing, means for producing commercially valuable plants and crops as well as the methods for making them and using them are identified. The uORFs identified and characterized with the present methods may be modified for the purpose of producing plants with modified traits. These traits may provide significant value in that they allow the plant to thrive in hostile environments. The traits may also comprise desirable morphological alterations.

### FIELD OF THE INVENTION

[0001] This description relates to the identification and utility of upstream open reading frames in a genome of a eukaryotic organism.

### BACKGROUND OF THE INVENTION

[0002] An upstream open reading frame (uORF) is a member of a class of small, conserved ORFs located upstream of protein-coding major ORFs (mORFs) in the 5′-untranslated regions (5′UTR) of mRNAs. uORFs act as cis acting elements that modify the activity of a downstream sequence that encodes a polypeptide. As such, they offer a novel opportunity to activate the expression of the downstream open reading frames encoding polypeptides of interest, through gene editing approaches that introduce mutations into the uORF sequences. Upregulation of the level of a target polypeptide can thereby be achieved by modulating the expression, for example, by the knocking-out or mutation, of a negatively acting uORF, that resides upstream of the sequence encoding the polypeptide. Not all eukaryotic genes contain uORFs and hitherto the barrier to the aforementioned approach has been in identifying the uORF sequences; existing algorithms often fail to accurately identify these elements due to their short length and also given that they are often initiated via non-AUG start codons (Hellens et al., 2016. Trend Plant Sci. 21:317-328). Herein, novel algorithms are presented that identify the presence of uORFs through analysis of so-called ribosome profiling data. Genetic modifications are then targeted to the uORF sequences to produce new desirable phenotypes that have a variety of applications depending upon the particular cell or organism. Such applications include new crop traits (e.g., increased yield, vigor, stress tolerance, delayed or accelerated flowering, altered morphology, or improved nutritional content), control of weeds and other pests through activation of gene networks that switch on cell death, activation of cell-death or tumor suppressor genes in cancerous cells, and/or production of desirable metabolites or peptides in fermentation systems.

[0003] uORFs are regulatory elements that are prevalent in eukaryotic mRNAs. uORFs are located upstream of protein-coding major ORFs (also known as long ORFs, main ORFs or mORFs) in the 5′-untranslated regions (5′UTR) of mRNAs. In some instances, uORFs are believed to modulate the translation initiation rate of downstream coding sequences (CDSs) by sequestering ribosomes. In other cases, uORFs encode evolutionarily conserved short peptides (sometimes referred to as “uPEPs”) that may function as cis-acting repressor peptides of the downstream mORF or its protein product. In many cases the actual presence of a uORF is strongly conserved across species. Thus, once a uORF has been identified in a target locus from a given species, the homologous locus from another species will typically also contain a uORF and be subject to uORF repression. Herein, the set of uORF containing loci from the model plant, Arabidopsis thaliana, is identified by application of our novel algorithm. These data now provide a roadmap for identifying the uORF containing loci from target crops based on homology searches for the polypeptides encoded by the mORFs at these loci. Thus, when a given desirable trait has been identified through overexpression of a gene in Arabidopsis, when that locus contains a uORF, the equivalent homologous gene in a target crop can be activated to obtain that desired trait by mutation of the uORF in the crop gene, which will typically reside at a similar position upstream of the mORF in the homologous locus of the target crop. A specific example concerns editing the uORF of LsGGP2, which encodes a key enzyme in vitamin C biosynthesis in lettuce, which was targeted based on the homologous gene having been demonstrated as being subject to uORF control in Arabidopsis by Laing et al (Liang et al., Plant Cell. 2015 March; 27(3): 772-786). Editing the uORF of the lettuce homolog not only increased oxidation stress tolerance, but also increased ascorbate content by ˜150% (Zhang et al. Nature Biotechnology volume 36, pages 894-898 (2018).

[0004] Genome-wide studies have revealed the widespread regulatory functions of uORFs in different species in different biological contexts (Zhang et al. 2019. Trends Biochem. Sci. 44:782-794. doi: 10.1016/j.tibs.2019.03.002). A given uORF may act as a translational control element for regulating expression of its associated downstream major open reading frame (mORF). The translational regulation of mORFs by highly conserved uORFs in response to cellular metabolite levels has been documented in plant studies (Hayden C. A. and Jorgensen R. A. 2007. BMC Biol. 5:32; Tran M. K., et al. 2008. BMC Genomics 9:361).

[0005] Various methods to identify uORFs in eukaryotes have been described. For example, to identify conserved peptide uORFs, Hayden and Jorgensen created “uORF-Finder”, a Perl program that compares the mORF amino acid sequence of cDNAs from one collection with the mORF sequences of another species' collection to identify putative mORF homologs, and then compares uORFs in the 5′ UTRs of the two paired sequences to identify uORFs with conserved amino acid sequences (Hayden and Jorgensen, 2007. BMC Biology 5:32). By comparing full-length cDNA sequences from Arabidopsis and rice, distinct homology groups of conserved peptide uORFs are so identified. Skarshewski et al. describe the use of “uPEPperoni”, an online tool for upstream open reading frame location and analysis of transcript conservation (Skarshewski, A., et al. 2014. BMC Bioinform. 15: 36. doi: 10.1186/1471-2105-15-36).

[0006] Rather than making use of bioinformatics-based analysis, Ingolia et al. describe methods for ribosome profiling: identifying uORFs by evaluating ribosome occupancy of upstream open reading frames and other sequences. See, for example, U.S. Pat. No. 9,677,068; Ingolia N. T., 2014. Cell Reports 8: 5, 1365-1379. See also Ingolia N. T. 2011. Cell 11; 147: 789-802 in which the authors describe how the majority of putative lincRNAs contain regions of high translation comparable to protein-coding genes. Specific start sites marked by harringtonine followed by ribosome footprints extended to the first in-frame stop codon. The majority of novel near-cognate initiation sites detected drive the translation of uORFs. This is consistent with the high level of translation that is observed on many 5′ UTRs as opposed to 3′ UTRs, which are almost devoid of ribosomes.

[0007] In contrast to prior described methods, the new methodology of the current invention identifies uORFs based the ability to sharply delineate stop codons based on an abrupt drop off (i.e., a precipitous decline in) ribosome occupancy at those locations, as opposed to identification of start codons, which are often non-canonical and less readily defined.

[0008] The present invention relates to methods and compositions for identifying and characterizing uORFs in eukaryotes, and specifically plants, and means for modifying the uORFs to produce desirable traits. In so doing, means for producing commercially valuable plants and crops as well as the methods for making them and using them are identified.

[0009] The uORFs identified and characterized with the present methods may be modified for the purpose of producing plants with modified traits, particularly traits that address agricultural, food-production and material-production needs as well as needs for environmental rehabilitation and carbon sequestration. These traits may provide significant value in that they allow the plant to thrive in hostile environments, where, for example, temperature, water and nutrient availability or salinity may limit or prevent growth of plants lacking the modified traits. The traits may also comprise desirable morphological alterations, including alterations of flowering time, larger or smaller size, disease and pest resistance, light response, alterations in biochemical composition, and other desirable phenotypes. In particular, with growing interest in producing crops under controlled indoor conditions, traits such as delayed flowering or more compact architecture are often desirable, particularly in leafy greens.

[0010] The present invention also relates to methods and compositions for eliminating undesirable plants, for example, weeds, in cultivated beds or fields of crop or ornamental plants, lawns, playing fields, or in municipal settings.

[0011] Other aspects and embodiments of the invention are described below and can be derived from the teachings of this disclosure as a whole.

### SUMMARY OF THE INVENTION

[0012] The present description pertains to novel methods for identification of regulatory regions within the genome of a eukaryotic organism comprising one or more upstream open reading frames (uORFs) that reside upstream of one or more downstream open reading frames that encoding one or more polypeptides including regulatory polypeptides or transcription factors. Once identified, the uORF sequences can be modified through gene editing techniques to induce new desired phenotypes in a cell (i.e., a target cell) or organism.

[0013] In one embodiment, the present description pertains to a method for identifying a uORF through application of an algorithm to ribosome profiling data. Rather than a conventional but often unsuccessful approach to finding ORF sequences by looking for at a canonical ATG start codon or even an alternative start codon, with or without ribosome enrichment information, the present algorithm and unconventional method identify the presence of the uORF in the genome of an organism based on the existence of ribosome enrichment in the interval from one stop codon to the next stop codon within the same open reading frame. The latter stop codon represents the end of a putative uORF. The sequence immediately upstream of the latter stop codon represents a potential target for gene editing that disrupts the function of the uORF. Once the uORF function is disrupted, translation of the downstream main ORF is increased and the polypeptide encoded by the main ORF produces an improved trait, that is, a desirable phenotype, in an organism or a target cell of the organism.

[0014] The present method identifies putative uORFs through application of an algorithm that evaluates ribosome profiling data and includes the steps of:
[0015] a) identifying an existent or putative major Open Reading Frame (ORF) in the genome of an organism and obtaining ribosome profiling data in the genome of the organism. Identification of the ORF may be through original research (that is, de novo) or from extant public or private knowledge of functional or putatively functional gene sequences;
[0016] b) evaluating the ribosome occupancy of at least one region of the genome that is upstream of the ORF;
[0017] c) identifying a location of the genome upstream of the ORF where there is both ribosome enrichment, and downstream of the that location there is an abrupt drop-off in ribosome occupancy;
[0018] d) identifying the stop codon of a putative or actual uORF in the genome from the appearance of an abrupt drop off in ribosome occupancy at the location;
[0019] e) identifying a prior or “first” stop codon upstream and in frame of the putative uORF's stop codon; and
[0020] f) thus, the algorithm identifies presence of a putative uORF within the genome from the ribosome enrichment data within the interval from the first stop codon to the putative uORF's stop codon within the same open reading frame.

[0021] The present description is also directed to a cell, plant cell, plant, or other organism that comprises an introduced targeted genetic modification at a native genomic locus. The native genomic locus comprises a mutation in a uORF that is located in the 5′ UTR of a gene that encodes a polypeptide with cellular regulatory activity. The polypeptide comprises an amino acid sequence with a percentage identity to a polypeptide provided in the Sequence Listing with this application, wherein the percentage identity is at least 30% or at least 35%, or at least 40%, or at least 45%, or at least 50%, or at least 55%, or at least 60%, 61%, 62%, 63%, 64%, 65%, 66%, 67%, 68%, 69%, 70%, 71%, 72%, 73%, 74%, 75%, 76%, 77%, 78%, 79%, 80%, 81%, 82%, 83%, 84%, 85%, 86%, 87%, 88%, 89%, 90%, 91%, 92%, 93%, 94%, 95%, 96%, 97%, 98%, or at least 99%, or about 100% identity to a polypeptide provided in the instant Sequence Listing. The targeted genetic modification increases expression level and/or activity of the encoded polypeptide with cellular regulatory activity.

[0022] The present description also pertains to a crop, turf, weed, or ornamental plant that contains an introduced targeted genetic modification. The introduced targeted genetic modification comprises a non-native allele that further comprises a mutation within a uORF located in the 5′ UTR of a gene that encodes a polypeptide with cellular regulatory activity. The polypeptide has an amino acid sequence identity to a sequence provided in the Sequence Listing provided with this application. The Sequence Listing identifies loci that encode polypeptides of interest which are subject to upstream uORF control, along with the identified position and sequence of the uORFs in a reference plant genome (Arabidopsis). The presence of uORFs upstream of an mORF encoding a homologous polypeptide in a target crops will typically be conserved. The genetically modified plant exhibits an improved trait compared to a reference or control plant of the same species that lacks the non-native allele. The amino acid sequence identity is at least 30% or at least 35%, or at least 40%, or at least 45%, or at least 50%, or at least 55%, or at least 60%, 61%, 62%, 63%, 64%, 65%, 66%, 67%, 68%, 69%, 70%, 71%, 72%, 73%, 74%, 75%, 76%, 77%, 78%, 79%, 80%, 81%, 82%, 83%, 84%, 85%, 86%, 87%, 88%, 89%, 90%, 91%, 92%, 93%, 94%, 95%, 96%, 97%, 98%, or at least 99%, or about 100% identity to a sequence provided in the Sequence Listing.

[0023] The present description is also directed to a method for producing an improved trait in a crop plant comprising introducing a targeted genetic modification into the genome of the crop plant. The targeted genetic modification creates a non-native allele of a gene that further comprises a mutation in a uORF in the 5′UTR of a gene that encodes a polypeptide with cellular regulatory activity. The polypeptide has an amino acid sequence with a percentage identity to a polypeptide provided in the Sequence Listing filed with this description. A plant of the crop plant is then selected and the selected plant contains the non-native allele and exhibits the improved trait compared to a reference or control plant of the same species that lacks the non-native allele. The targeted genetic modification modulates the expression level and/or activity of the encoded polypeptide with transcriptional regulatory activity; and the percentage identity is at least 30%, 35%, 40%, 45%, 50%, 55%, 60%, 65%, 70%, 75%, 80%, 85%, 90%, 95%, 96%, 97%, 98%, 99%, or about 100%.

[0024] The instant description is also directed to a process of killing the cells of plant involving the mutation of a uORF that is upstream of a main ORF that encodes a necrosis-inducing polypeptide that triggers death of the cells of the plant. In this method, parts of the plant are contacted with a suspension containing cells of an Agrobacterium strain containing a nucleic acid construct. The nucleic acid construct may also be delivered to the plant by other mechanisms including coating on nanoparticles (such as, but not limited to, DNA nanoparticles, carbon nanotubes, carborundum powder, magnetofection, peptide nanoparticles and clay nanosheets). Various methods of delivery of nucleic acid constructs into plant cells are detailed by Lv et al., 2020, Plant Journal, Volume 104, 880-891 (doi.org/10.1111/tpj.14973). The nucleic acid construct comprises a gene editing system that expresses in the cells of the plant a guide RNA that introduces a mutation in a uORF that is upstream of a main ORF in the genome of the plant.

[0025] The instant description is also directed to an herbicidal composition that is contacted to a plant such as a weed, wherein the genome of the plant comprises a main ORF that encodes a necrosis-inducing polypeptide that triggers death of the cells of the plant. The herbicidal composition comprises a suspension containing cells of an Agrobacterium strain containing a nucleic acid construct that comprises a gene editing system. The gene editing system expresses a guide RNA in the cells of a target weed and the guide RNA introduces a mutation in a uORF that is upstream of a main ORF in the genome of the plant or weed.

[0026] The instant description is also directed to a genetically modified cell comprising a non-naturally occurring polynucleotide that has been produced by gene editing. The non-naturally occurring polynucleotide encodes for a polypeptide that results in the production of an increased level of a target molecule or enzyme compared to a control microorganism that does not include the non-naturally polynucleotide. The non-naturally occurring polynucleotide comprises a mutation in a uORF that resides in the same transcript as a main ORF that encodes the polypeptide.

[0027] The instant description also pertains to a process for controlling cancerous cells or cells of a tumor, the method comprising contacting the cancerous cells or cells of the tumor with a delivery vector containing a nucleic acid construct comprising a gene editing system which expresses in the cells a guide RNA which introduces a mutation in a uORF that is upstream of a main ORF in the genome of said cells. The main ORF encodes polypeptide that triggers death or inhibits cell division of the cancerous cells or cells of the tumor.

[0028] The instant description also pertains to a process for improving plant traits through exogenous application of the short peptides (so-called “uPEPs”) that are encoded by uORFs. Through such a process, a uPEPs is used as biostimulant to enhance crop growth, yield, quality, harvestability, and/or performance.

### BRIEF DESCRIPTION OF THE SEQUENCE LISTING AND DRAWINGS

[0029] The Sequence Listing provides exemplary polynucleotide and polypeptide sequences of the instant disclosure. The Sequence Listing is named UOR-0002P_ST25, was created on May 27, 2022 and is 6,751,561 bytes in size. The entire content of the Sequence Listing is hereby incorporated by reference.

[0030] FIGS. 1 through 3 show graphical representations of ribosome profiling and analysis. The black trace represents the ribosome coverage along the length of the cDNA sequence. Long ORF (mORF) is a solid black line above the trace, with the AUG annotated as a black triangle at coverage=0. All ribosome profile ratios (crosses (X)) and ribosome profile differences (plus (+)) are shown above the coverage=0 (and scaled to fit the maximum ribosome profile count). All possible AUG codons are black circles at coverage=0. The stop-stop intervals>50 are shown as dashed, dotted and dot-dash horizontal lines (represent the three reading frames) below coverage=0 (note the long stop-stop corresponding to the long ORF here is a dotted line extends upstream of the ATG start codon). Stop-stop fragment selected with ratios (crosses (X)) and/or differences (plus (+)) as being statistically significant are annotated at the 3′ stop.

[0031] FIG. 4 depicts a binary vector that may be delivered into the cells of a plant by means of Agrobacterium or via other methods such as the use of nanoparticles. The genes bounded by T-DNA borders comprise a gene editing system that will express a guide RNA (encoded by the DNA sequence denoted “guide”) in the cells of the plant targets the knock-out of, or reduces the activity of, a uORF that has a native role in suppressing the expression of a mORF encoding a polypeptide that causes a trait of interest. The transformation selection typically encodes resistance to an herbicide or antibiotic that enables transformed edited cells to be selected and regenerated into a whole plant. With the system expressed, the polypeptide is upregulated in the cells of the plant and the desired trait is obtained. In one embodiment of the inventions the plant in question is a weed plant and the T-DNA does not necessarily integrate into the host weed genome, but the gene editing system transiently expresses a guide RNA that knocks out or reduces the activity of a uORF that natively suppresses a polypeptide that triggers cellular necrosis. When the system is activated in cells of a target weed, necrosis is induced and the weed is killed or controlled.

[0032] FIGS. 5 and 6 show the relative ribosome profile coverage (ribosome coverage/RNA-Seq coverage) 100 nucleotides either side of the AUG start (FIG. 5) and stop (FIG. 6) codon for all Arabidopsis genes with a leader sequence greater than 200 nucleotides and or tail sequence longer than 200 nucleotides. Histograms show the counts of the relative expression (ribosome coverage/RNA-Seq coverage) are in five regions relative to the AUG start in FIG. 5 (1=−70 to −42, 2=−41 to −14, 3=−13 to 14, 4-15 to 42 and 5=43 to 70) and to the stop codon in FIG. 6 (1=−70 to −37, 2=−36 to −4, 3=−3 to 14, 4-15 to 42 and 5=43 to 70).

[0033] FIG. 7 shows Amaranthus hybridus subsp. hybridus (hybridus contigs scaffolded to hypochondriacus): polished genome contigs of Amaranthus hybridus scaffolded to pseudochromosomes of Amaranthus hypochondriacus with reveal finish (v1.0, id57429). Gray bars present AUG codon \for each of the three reading frames (noting the gene is in reverse order) and black bars represented stop codons (UAG, UAA and UGA) for each of the three reading frames (noting the gene is in reverse order). Potentially uORFs are defined by two adjacent stop-stop intervals in the same open reading frame. In this way, putative uORF of genes can be identified and tested as candidates for gene editing.

[0034] FIG. 8 illustrates a method for optimizing activity from a transgene by dampening the translation of an encoded protein by inclusion of a uORF in the transcript. In the case where a transgenic event has already been generated in a target plant, the uORF can be inserted by gene editing. Alternatively, the uORF can be engineered into the transformation construct prior to the transformation process. In this latter case, the uORF would preferably be introduced into the leader of the transgene to be overexpressed through direct synthesis, or ligation, at the time when the transformation construct is assembled. Footnote 1, indicated by the italicized numeral “1” in FIG. 8, shows mRNA from transgene; introduced uORF dampens translation of mORF. Footnote 2, indicated by the italicized numeral “2” in FIG. 8, shows a uORF intentionally introduced into this region (by gene editing) to dampen activity of transgene by reducing translation of encoded mRNA into protein.

### DETAILED DESCRIPTION

### Definitions

[0035] “uORFs” are upstream open reading frames, that often reside in an mRNA transcript located upstream of protein-coding main ORFs (Note that mORFs, which are also sometimes referred to as long ORFs or major ORFs and the terms mORF, main ORF, long ORF and major ORF are used interchangeably in this application). uORFs are a class of small ORFs that acts as repressors of their downstream mORFs. uORFs sometimes encode evolutionarily conserved functional peptides such as cis-acting regulatory peptides and which act as repressors, including for example, through translational repression.

[0036] A “polypeptide” is an amino acid sequence comprising a plurality of consecutive polymerized amino acid residues e.g., at least about 15 consecutive polymerized amino acid residues, optionally at least about 30 consecutive polymerized amino acid residues, at least about 50 consecutive polymerized amino acid residues. In many instances, a polypeptide comprises a polymerized amino acid residue sequence that is a transcription factor or a domain or portion or fragment thereof. Additionally, the polypeptide may comprise 1) a localization domain, 2) an activation domain, 3) a repression domain, 4) an oligomerization domain, or 5) a DNA-binding domain, or the like. The polypeptide optionally comprises modified amino acid residues, naturally occurring amino acid residues not encoded by a codon, non-naturally occurring amino acid residues.

[0037] “Identity” or “similarity” refers to sequence similarity between two polynucleotide sequences or between two polypeptide sequences, with identity being a stricter comparison. The phrases “percent identity” and “% identity” refer to the percentage of sequence identity found in a comparison of two or more polynucleotide sequences or two or more polypeptide sequences. “Sequence similarity” refers to the percent similarity in base pair sequence (as determined by any suitable method) between two or more polynucleotide sequences. Two or more sequences can be anywhere from 0-100% similar, or any integer value therebetween. Identity or similarity can be determined by comparing a position in each sequence that may be aligned for purposes of comparison. When a position in the compared sequence is occupied by the same nucleotide base or amino acid, then the molecules are identical at that position. A degree of similarity or identity between polynucleotide sequences is a function of the number of identical or matching nucleotides at positions shared by the polynucleotide sequences. A degree of identity of polypeptide sequences is a function of the number of identical amino acids at positions shared by the polypeptide sequences. A degree of homology or similarity of polypeptide sequences is a function of the number of amino acids at positions shared by the polypeptide sequences.

[0038] The term “homolog” or “homologue” as further described and used herein means a polypeptide or transcription factor from the same species or a different species which has a substantial level of identity within either its conserved domain and/or across its entire sequence, wherein the level of identity is at least 30% or at least 35%, or at least 40%, or at least 45%, or at least 50%, or at least 55%, or at least 60%, 61%, 62%, 63%, 64%, 65%, 66%, 67%, 68%, 69%, 70%, 71%, 72%, 73%, 74%, 75%, 76%, 77%, 78%, 79%, 80%, 81%, 82%, 83%, 84%, 85%, 86%, 87%, 88%, 89%, 90%, 91%, 92%, 93%, 94%, 95%, 96%, 97%, 98%, or at least 99%, or about 100% identity as compared to a first polypeptide or transcription factor and which polypeptide or transcription factor has a similar or comparable function in a cell or organism as compared to the first polypeptide or transcription factor.

[0039] “Orthologs” are evolutionarily related genes that have similar sequence and similar functions. Orthologs are structurally related genes in different species that are derived by a speciation event.

[0040] The term “introduced targeted genetic modification” or “targeted genetic modification” refers to a change in the DNA sequence of a plant at a specific chromosomal position (also known as a locus) in the genome which is chosen by a skilled practitioner (such as plant breeder or molecular biologist) and which change is introduced by a process of gene editing and/or selection using a specific complementary nucleic acid molecule sequence as a guide or probe to enable the process.

[0041] The term “native genomic locus” refers to a gene or DNA sequence that is present in the genome of a wild-type plant at particular chromosomal position of a given species. The “native genomic locus” typically comprises a region spanning a start to stop codon, along with any intervening introns, that is transcribed to generate a main ORF that encodes a long polypeptide that is typically around 100 amino acids or more in length, as well as the associated upstream regulatory elements including the promoter region and any elements that control the activity of the mORF such as uORFs. A uORF is present in the same mRNA transcript as the mORF that the uORF regulates; both the uORF and the mORF can therefore be considered part of the same overall native genomic locus. A native genomic locus is often specified by reference to an accession number, deposited in GenBank, which, for example, indicates the DNA sequence and encoded polypeptide that is present at that position. It should also be noted that a locus may encode multiple protein variants that result from alternative splicing of mRNA and these variants are represent by different “gene models” that are denoted by the accession number followed by a dot and a number.

[0042] The terms “non-native allele of a gene” or “non-naturally occurring allele of a gene” refer to a sequence variant of a gene (where the term “gene” potentially includes both the protein coding region, encoded by a main ORF, as well as upstream control elements such as the promoter region and elements such as uORFs) from a given plant species that has a sequence of nucleotides which has been produced by human intervention (e.g., through gene editing or selection such as through TILLING) and which is not typically found in nature in either the genome of a wild-type plant of that species or in the genome of a plant of that species taken from a naturally-occurring wild population. The term “TILLING” is an acronym for “targeted induced local lesions in genome” and has been reviewed by Kurowska et al., 2011, Appl Genet. 52(4): 371-390.

[0043] The term “variant”, as used herein, may refer to polynucleotides or polypeptides, that differ from the presently disclosed polynucleotides or polypeptides, respectively, in sequence from each other, and as set forth below.

[0044] With regard to polynucleotide variants, differences between presently disclosed polynucleotides and polynucleotide variants are limited so that the nucleotide sequences of the former and the latter are closely similar overall and, in many regions, identical. Due to the degeneracy of the genetic code, differences between the former and latter nucleotide sequences may be silent (i.e., the amino acids encoded by the polynucleotide are the same, and the variant polynucleotide sequence encodes the same amino acid sequence as the presently disclosed polynucleotide. Variant nucleotide sequences may encode different amino acid sequences, in which case such nucleotide differences will result in amino acid substitutions, additions, deletions, insertions, truncations or fusions with respect to the similar disclosed polynucleotide sequences. These variations result in polynucleotide variants encoding polypeptides that share at least one functional characteristic. The degeneracy of the genetic code also dictates that many different variant polynucleotides can encode identical and/or substantially similar polypeptides in addition to those sequences illustrated in the Sequence Listing.

[0045] Also within the scope of the invention is a variant of a nucleic acid listed in the Sequence Listing, that is, one having a sequence that differs from the one of the polynucleotide sequences in the Sequence Listing, or a complementary sequence, that encodes a functionally equivalent polypeptide (i.e., a polypeptide having some degree of equivalent or similar biological activity) but differs in sequence from the sequence in the Sequence Listing, due to degeneracy in the genetic code. Included within this definition are polymorphisms that may or may not be readily detectable using a particular oligonucleotide probe of the polynucleotide encoding polypeptide, and improper or unexpected hybridization to allelic variants, with a locus other than the normal chromosomal locus for the polynucleotide sequence encoding polypeptide.

[0046] The term “plant” includes whole plants, shoot vegetative organs/structures (e.g., leaves, stems and tubers), roots, flowers and floral organs/structures (e.g., bracts, sepals, petals, stamens, carpels, anthers and ovules), seed (including embryo, endosperm, and seed coat) and fruit (the mature ovary), plant tissue (e.g., vascular tissue, ground tissue, and the like) and cells (e.g., guard cells, egg cells, and the like), and progeny of same. The class of plants that can be used in the method of the invention is generally as broad as the class of higher and lower plants amenable to transformation techniques, including angiosperms (monocotyledonous and dicotyledonous plants), gymnosperms, ferns, horsetails, psilophytes, lycophytes, bryophytes, and multicellular algae. See for example, Daly et al. (2001) Plant Physiol. 127: 1328-1333; Ku et al. (2000) Proc. Natl. Acad. Sci. 97: 9121-9126; and see also Tudge, in The Variety of Life, Oxford University Press, New York, NY (2000) pp. 547-606.

[0047] A “trait” is sometimes used interchangeably with the term “phenotype” and refers to a physiological, morphological, biochemical, or physical characteristic of a cell or organism, including of a plant or of a particular plant material or of a plant cell. In some instances, this characteristic is visible to the human eye, such as seed or plant size, or pigmentation, or can be measured by biochemical techniques, such as detecting the protein, starch, or oil content of seed or leaves, or by observation of a metabolic or physiological process, e.g. by measuring uptake of carbon dioxide, or by the observation of the expression level of a gene or genes, e.g., by employing Northern analysis, RT-PCR, microarray gene expression assays, RNA Seq or reporter gene expression systems, or by agricultural observations such as stress tolerance, yield, or pathogen tolerance. Any technique can be used to measure the amount of, comparative level of, or difference in any selected chemical compound or macromolecule in the transgenic plants, however.

[0048] “Trait modification” refers to a detectable difference in a characteristic in a plant ectopically expressing a polynucleotide or polypeptide of the present invention relative to a plant not doing so, such as a wild-type plant. In some cases, the trait modification can be evaluated quantitatively. For example, the trait modification can entail at least about a 2% increase or decrease in an observed trait (difference), at least a 5% difference, at least about a 10% difference, at least about a 20% difference, at least about a 30%, at least about a 50%, at least about a 70%, at least about an 85%, or about a 100%, or an even greater difference compared with a wild-type plant. It is known that there can be a natural variation in the modified trait. Therefore, the trait modification observed entails a change of the normal distribution of the trait in the plants compared with the distribution observed in wild-type plant.

[0049] “Wild type” or “Wild-type”, as used herein, refers to a cell, tissue or plant that has not been genetically modified to mutate, knock out, ectopically-express, or overexpress one or more of the presently disclosed target genes (such as genes encoding transcription factors). Wild-type cells, tissue or plants may be used as controls to compare levels of expression and the extent and nature of trait modification with cells, tissue or plants in which target gene expression is altered or ectopically expressed, e.g., in that it has been knocked out or overexpressed.

[0050] “Yield” or “plant yield” refers to increased plant growth, increased crop growth, increased biomass, and/or increased plant product production, and is dependent to some extent on temperature, plant size, organ size, planting density, light, water and nutrient availability, and how the plant copes with various stresses, such as through temperature acclimation and water or nutrient use efficiency.

[0051] A “crop” plant includes cultivated plants or agricultural produce, and may be a grain, vegetables, or fruit plant, generally considered as a group. A crop plant may be grown in commercially useful numbers or amounts.

[0052] An “Improved Trait” that may be conferred to plants and provide an environmental, commercial, or ornamental advantage to crop plants may include, but is not limited to, a trait selected from the group consisting of:
[0053] a yield increase, improved flavor, improved texture, altered circadian rhythm, accelerated flowering, accelerated senescence, delayed senescence, increased branching, reduced branching, increased apical dominance, reduced apical dominance, shade tolerance, increased root mass, increased root hair number, increased vegetative mass, increased fruit mass, improved fruit quality, increased germination rate, increased trichome length, reduced trichome length, reduced thorns, reduced spines, thornless, altered leaf shape, increased leaf number, reduced leaf number, altered leaf angle, altered leaf position, altered branch angle, increased peelability, reduced cellular adhesion, increased cellular adhesion, reduced peel thickness, reduced fruit skin thickness, increased fruit skin thickness, increased seed coat thickness, reduced seed coat thickness, seedless, reduced seed size, increased seed size, apomixis, increased embryogenesis, increased susceptibility to transgenic transformation, increased callus formation, increased embryo formation, increased root formation, increased cell division, reduced cell division, sterility, male sterility, inviable pollen, lack of stamens, lack of carpels, increased carpel number, increased petal number, reduced petal number increased trichome number, reduced trichome number, increased stem width, reduced stem width, increased internode length, reduced internode length, increased floral organ size, altered floral organ shape, reduced floral organ size, reduced fruit abscission, reduced pod shattering, altered organ abscission, variegation, increased hypocotyl length, reduced hypocotyl length, delayed flowering, elimination of flowering, sterility, improved osmotic stress tolerance, improved photosynthesis, improved nitrogen use efficiency, improved phosphorus use efficiency, improved potassium use efficiency, increased nutrient use efficiency, increased nutrient uptake, increased uptake of a metal ion, increased sequestration of a heavy metal, improved oxidative stress tolerance, increased pigment level, improved salt tolerance, improved cold tolerance, improved tolerance of freezing damage, improved freezing tolerance, improved dehydration stress, drought tolerance, improved recovery following drought, decreased wilting, increased plastid number, increased chlorophyll content, increased thylakoid density, increased photosynthetic capacity, increased respiration, reduced respiration, increased photorespiration, reduced photorespiration, increased transpiration, reduced transpiration, increased stomatal conductivity, reduced stomatal conductivity, increased carbon fixation, increased carbon sequestration, increased photosynthetic rate, increased carotenoid level, reduced carotenoid level, increased electron transport, improved non-photochemical quenching, increased ion transport, reduced ion transport, altered carbon to nitrogen balance, increased sensitivity to a hormone, reduced sensitivity to a hormone, reduced sensitivity to ethylene, increased auxin level, reduced auxin level, increased auxin transport, increased auxin sensitivity, reduced auxin sensitivity, increased gibberellin level, reduced gibberellin increased gibberellin sensitivity, reduced gibberellin sensitivity, increased abscisic acid level, reduced abscisic acid level, increased abscisic acid sensitivity, reduced abscisic acid sensitivity, increased cytokinin level, reduced cytokinin level, increased cytokinin level, reduced cytokinin level, increased cytokinin sensitivity, reduced cytokinin sensitivity, increased jasmonate level, reduced jasmonate level, increased jasmonate sensitivity, reduced jasmonate sensitivity, increased salicylic acid level, reduced salicylic acid level, reduced salicylic acid sensitivity, increased salicylic acid sensitivity, increased strigolactone level, reduced strigolactone level, increased sensitivity to strigolactone, reduced sensitivity to strigolactone, reduced sensitivity to ethylene, increased sensitivity to ethylene, accelerated ripening, delayed ripening, reduced fruit spoilage, increased shelf life, improved heat stress, improved tolerance to low nitrogen conditions, increased seedling vigor, increased disease resistance, increased resistance to a fungal pathogen, increased resistance to bacterial pathogen, increased resistance to a viral pathogen, increased resistance to Botrytis; increased resistance to Erysiphe; increased resistance to Fusarium; increased resistance to Sclerotinia; increased rust resistance, increased resistance to Phytophthora, increased resistance to black sigatoka, increased resistance to Xanthomonas, increased resistance to a necrotrophic fungus, increased resistance to a biotrophic fungus, increase nematode resistance, increased insect resistance, herbivore resistance, increased mollusk resistance, increased protein levels, increased oil levels, reduced lignin level, increased THC level, increased CBD level, increased anthocyanin level, reduced anthocyanin level, increased nutrient level in tissue, increased vitamin level in tissue, increased carbohydrate level, reduced level of a carbohydrate, increased starch level, increased sugar level, increased BRIX, increased protein level, reduced protein level, increased level of a metabolite, increased level of photosynthetic pigments, increased lipid level, reduced lipid level, altered fatty acid saturation, increased level of saturated fat, reduced level of saturated fat, increased tocopherol level, reduced tocopherol level, increased prenyl lipid levels, increased nutritional content of tissues, increased processability, increased calorific value, reduced levels of chlorine, increased alkaloid level, reduced alkaloid level, increased wax level, reduced wax level, increased wax ester level, increased tannin level, increased taxol level, increased xanthophyll levels, increased bioplastic levels, increased level of a biopolymer, reduced levels or a biopolymer, altered starch composition, increased latex level, and increased rubber level.
[0054] “uPEP” as used herein means the small peptide encoded by a uORF.

### DESCRIPTION OF THE SPECIFIC EMBODIMENTS

[0055] Upstream open reading frames (uORF) are short open reading frames that could potentially code for peptides and which reside within the leader sequence of a messenger RNA. To avoid confusion, within this description the term ‘leader’ sequence is often used rather than five prime untranslated regions (5′UTRs). This distinction is made because, by definition, uORF implies translation, and so the name ‘untranslated’ may be misleading. Similarly, the three prime untranslated regions (3′UTR) may also be capable of translation and so in this description the ‘tail’ sequence may sometimes be used to refer to this region. The present description relates to novel methods for identification of regulatory regions within the genome of a eukaryotic organism comprising one or more uORFs encoding one or more polypeptides including regulatory polypeptides or transcription factors. Once identified, the uORF sequences can be modified through gene editing techniques to induce new desired phenotypes in the target cell or organism.

The Challenge of Annotating uORFs

[0056] The small size of upstream open reading frames makes ab initio annotation extremely challenging. This is because, in even small eukaryotic genomes, there is a high statistical likelihood of finding an open frame of a hundred amino acids or 300 nucleotides or less, purely by chance. It is therefore difficult to discriminate short open reading frames that are functional from those that exist by chance alone. For this reason, most gene prediction tools only consider open reading frames greater than 100 amino acids. The exception to this is when shorter amino acids have been determined through experimental evidence, through homology to known genes of short amino acid sequence or other related short sequences. Small peptides of less than 100 aa remain an under-represented in almost all genome annotation (Hellens 2016. Trend Plant Sci. 21:317-328).

[0057] uORF annotation is made more complicated as there is increasing evidence that these short open reading frames do not follow that normal convention of most annotated peptides by starting with an AUG codon and a methionine amino acid. A number of well documented uORF sequences, including the uORF in GDP galactose pyrophosphorylase (GGP), has been shown to start with a non-AUG (also referred to as near cognate or non-canonical) start codon.

[0058] Taken together, these two features of uORFs, namely the small size and noncanonical start codon, make annotation prediction particularly difficult using computational means alone.

Using Data and a Novel Approach to Predict and Annotate uORFs

[0059] Ribosome profiling is a technique that uses next-generation sequencing technologies to display the region that ribosomes reside on a messenger RNA molecule. While the footprint does not demonstrate translation, it does demonstrate ribosome occupancy, and translation may therefore be implied. This information has been essential in the annotation of upstream open reading frames as the peptide sequence themselves are very rarely seen in accurate-mass-based peptide detection methodologies. Indeed, for most upstream open reading frames, ribosome profiling along with mutational analysis is the only evidence available to demonstrate functional uORFs.

[0060] Many methods have used ribosome profiling data to guide the annotation of uORFs, however, all methods to date rely on determining potential uORF start and stop sites and then looking for ribosome enrichment along the candidate uORF. Whilst the majority of these approaches have assumed an ATG start, more recent modifications have extended the potential start sites to include all the possible near cognate start sites (where one of the nucleotides A, U or G is replaced with a different nucleotide). Thus, detecting uORFs by looking for their translational start site is challenging because start codons other than AUG are frequently used. In addition, ribosomes accumulate in the leader sequence prior to translation initiation. By contrast, ribosome profiling data accurately maps translation stop sites. The three stop codons: UAA, UAG and UGA appeared to be ubiquitously used in both long open reading frames and shorter upstream open reading frames. Therefore, by using ribosome profiling data to predict stop codons the corresponding sequence interval between two in-frame stop codons can be assumed to contain the upstream open reading frame.

[0061] Our novel approach, which is the basis of the invention detailed herein, does not make any assumption about the position where a uORF starts. Rather, an open reading frame interval from one stop codon to the next stop codon within the same open reading frame is determined and it is assumed that if there is ribosome enrichment within this region, then the start of the uORF exists downstream of the first stop codon (5′ stop)). The ability to identify these stop-stop intervals and the use of the stop-stop interval to denote the presence of a uORF is are the novelty within this methodology. By determining the boundaries of the region within which a uORF exists in this manner, it is then possible to target the region through mutation and/or gene editing to modify or remove the uORF. The inventive approach detailed herein has been reduced to practice through its application to a variety of datasets including datasets from Arabidopsis.

### Raw Data Preparation

[0062] Raw data was downloaded and trimmed according to the publication method for each dataset, using the Trim Sequence (1.0.2) tools in the Galaxy environment.

[0063] Gene sequences for 5′UTR, 3′UTR and cDNA were downloaded from the TAIR (website using TAIR10 (20101214 updated) annotation files.

[0064] In Galaxy, BWA (0.7.17.4) was used to map the ribosome profiling short reads to the Arabidopsis gene model. BAM filter was used to remove unmapped reads. BED genome coverage (2.29.2 and −dz coverage output) was then used to generate file BEDgraph file for downloading. Files were imported as .csv into the R package for further analysis.

### Ribosome Profiles at Starts and Stops of Long Open Reading Frames

[0065] To determine the ribosome profiling at long ORFs, ribosome coverage was calculated for all annotated long open reading frames cDNA from the Arabidopsis genome. The ribosome profiles around the long ORF start and stop codons were generated. Taking a window of 100 nucleotides before and after both start and stop, the ribosome profiling coverage for all the Arabidopsis genes was determined. Coverage for both ribosome profiling data and RNA-Seq data was generated using the Liu datasets (Liu et al. 2013. Plant Cell 25: 3699-3710). The relative ribosome profiling value (the ribosome profile coverage divided by the RNAseq coverage, was determined for each nucleotide position along the sequence before and after the start and stop codon. FIGS. 5 and 6 show a graphical representation of these data.

[0066] Given that ribosome profiling shows a distinct difference at the stop codon, these observations are used to support the annotation of novel upstream open reading frames. Because ribosome profiling was less accurate at predicting start codon, potential regions where uORFs may reside were identified by identifying all stop-stop intervals within the mRNA sequence of a given gene.
[0067] Code 1 identifies all stop-stop intervals where k<−50 #sets ORF min to 50 bases, start_codons<-c(“TGA”,“TAA”,“TAG”) and stop_codons<-c(“TGA”,“TAA”,“TAG”) and s2 is the sequence for the gene of interest (GOI) under consideration.

```
#find all ORF start
start_pos <- c( )
for (codon in start_codons) {
  matches <- matchPattern(codon,s2)
  start_pos <- c(start_pos, start(matches))
  }
start_pos <- sort(start_pos)
#find all ORF stops
stop_pos <- c( )
for (codon in stop_codons) {
  matches <- matchPattern(codon,s2)
  stop_pos <- c(stop_pos, start(matches))
  }
stop_pos <- sort(stop_pos)
```

[0068] Code 2. Identified the longest stop-stop regions using code modified (highlighted in bold) from www.montefiore.ulg.ac.be/˜kbessonov/archived_data/GBIO009-1course2012/presentations/HW1_2_review_slides_ORF_Finder.pdf

#ORF set-up
rm(for_plotting)
for plotting <- data.frame(“count” = 0, “frame” = 0, “current_start” = 0, “length” = 0)
stop_pointers <- c(0,0,0)
count <- 0
#find Stop for each Start according to reading frame from start = start_pos and stop =
stop_pos

| | |
|---|---|
| for (current_start in start_pos) { | #loop current_start from 1st to last |

start_pos
frame <- (current_start%%3) + 1
= the remainder of (current_start/3) + 1 ie the reading frame

| | |
|---|---|
| stop_pointer <- stop_pointers[frame] | stop_pointer is one value and |

stop_pointers is 3, and
if (stop_pointer <= length(stop_pos) && (stop_pointer == 0

| | |
|---|---|
| ∥ stop_pos[stop_pointer] <= current_start)) { | # change < |

```
to <=
    stop_pointer <- stop_pointer + 1
    while ( (stop_pointer <= length(stop_pos))
          && ((stop_pos[stop_pointer] <= current_start)
            ∥ (((stop_pos[stop_pointer]%%3) + 1) != frame)) ) {
      stop_pointer <- stop_pointer + 1
    }
    stop_pointers[frame] <- stop_pointer
    if (stop_pointer <= length(stop_pos)) {
      if ((stop_pos[stop_pointer] + 2 − current_start + 1) > k ) {
        count <- count + 1
        length = (stop_pos[stop_pointer]+2−current_start+1)
        for_plotting <- add_row(for_plotting, count,
              frame,
              current_start,
              length)
        current_stop <- current_start + length
```

[0069] Code 3. Calculates the ribosome profile counts over a span of NGS read length (read_length)+window at the end of the stop-stop fragments, taking into account the 15 nucleotides described above (offset<−15, window<−30, read_length<−29). Where GOI equals the gene of interest.

```
#add the RP_ratio calculator here
#Before the STOP
if (current_stop <= nchar(s2)-200) { ## to avoid 0 RP ratio at the 3′
        before_STOP_coverage <- filter(GOI_coverage,
              RP_fragment_start >= current_stop − (window +
read_length) &
              RP_fragment_start <= current_stop)
        before_STOP_coveage_total <- sum(before_STOP_coverage$Coverage)
        #Atfer the STOP
        after_STOP_coverage <- filter(GOI_coverage,
              RP_fragment_start >= current_stop + offset &
              RP_fragment_start <= current_stop + (offset + window +
read_length))
        after_STOP_coverage_total <- sum(after_STOP_coverage$Coverage)
        RP_ratio_of_coverage_at_STOP <-
(log(before_STOP_coveage_total)/log(after_STOP_coveage_total))
        RP_delta_of_coverage_at_STOP <- ifelse(before_STOP_coveage_total −
after_STOP_coveage_total >= 0, before_STOP_coveage_total −
after_STOP_coveage_total, 0)
        print(“RP Ratio”)
        print(RP_ratio_of_coverage_at_STOP)
        current_stop <- current_start + length
        RP_ratio_for_plotting <- add_row(RP_ratio_for_plotting,
          current_stop,
          window,
          offset,
          before_STOP_coveage_total,
          after_STOP_coveage_total,
          RP_ratio_of_coverage_at_STOP,
          RP_delta_of_coverage_at_STOP)
            }
        #}
        #end window loop
        }
      }
    }
  }
```

[0070] The output of this analysis is summarized in FIG. 2 where the gene of interest is AT4G26850.1 (the VTC2 gene, GDP galactose pyrophosphorylase AT4G26850.1)

### Whole-Genome Analysis of Ribosome Profiling Stop-Stop Fragments

[0071] Codes 1 to 3 were repeated for each of the 41,671 cDNAs in the TAIR annotations. Stop-Stop fragments were filtered for ratios that were five-fold difference between the before and after the stop, where the after stop count was greater than one. For each of the three datasets used, box plot analysis of the stop-stop coverage data was used to determine quartile 1 (Q1) ribosome profile count, and this value was used to determine the appropriate ribosome profiles difference (referred to as the Delta) for those gene models where ribosome counts after the stop codon=0, so ratios could not be calculated.

[0072] The Sequence Listing includes the culmination of genome analysis of ribosome profiles for all stop-stop regions for each Arabidopsis gene annotation using three datasets (Liu et al. 2013. Plant Cell 25: 3699-3710; Hsu et al. 2016. PNAS 113: E7126-E7135; and Bazin et al. 2017. PNAS 114: E10018-E10027). Statistically significant stop-stop fragments count before and after the fragment and for the leader, long ORF and tail regions are reported. For the fragments in the leader region, these are separated into the total number of short uORF, the number there are unique (noting some leader sequences may have multiple short uORF) and also the mORF count (noting by the definition provided here all long open reading frames will be extended to the upstream stop codon the proceeds the initiating AUG). For the unique uORF count (excluding multiple uORF within the leader sequence) the number detected using the ratio calculation, the delta calculation (when the ribosome count after the stop codon equal zero) or both are summarized. Finally, data lists for each of the three datasets were compared and only candidate uORF that appeared in at least two of the three datasets were included in the final list of 1999 gene models with potential uORF. Within the Sequence Listing the identified Arabidopsis sequences comprising uORFs are provided as the odd numbered sequences from SEQ ID NO: 1-3997, whereas the corresponding predicted PEP in each case is provided as the subsequent even numbered sequence, i.e., SEQ ID NO: 2, 4, 6 . . . 3998. The polypeptide products of the main ORFs from the loci identified as containing upstream uORFs are provided in SEQ ID NO: 3999-5155. Finally, example non-Arabidopsis DNA sequences comprising uORFs are provided in SEQ ID NO: 5156-5227.

[0073] Descriptions of the sequences that appear in the Sequence Listing are presented in Table 1.

TABLE 1
Description of sequences in the Sequence Listing

| SEQ | |
|---|---|
| ID NO: | Sequence Description |
| 1 | AGI number: AT1G01030.1 uORF ′5 STOP: 416 uORF 3′ STOP: 467 leader length: 613 |
| 2 | AGI number: AT1G01030.1 uORF ′5 STOP: 416 uORF 3′ STOP: 467 leader length: 613 |
| 3 | AGI number: AT1G01060.2 uORF ′5 STOP: 169 uORF 3′ STOP: 256 leader length: 550 |
| 4 | AGI number: AT1G01060.2 uORF ′5 STOP: 169 uORF 3′ STOP: 256 leader length: 550 |
| 5 | AGI number: AT1G01060.4 uORF ′5 STOP: 138 uORF 3′ STOP: 255 leader length: 380 |
| 6 | AGI number: AT1G01060.4 uORF ′5 STOP: 138 uORF 3′ STOP: 255 leader length: 380 |
| 7 | AGI number: AT1G01060.4 uORF ′5 STOP: 161 uORF 3′ STOP: 248 leader length: 380 |
| 8 | AGI number: AT1G01060.4 uORF ′5 STOP: 161 uORF 3′ STOP: 248 leader length: 380 |
| 9 | AGI number: AT1G01060.5 uORF ′5 STOP: 252 uORF 3′ STOP: 336 leader length: 765 |
| 10 | AGI number: AT1G01060.5 uORF ′5 STOP: 252 uORF 3′ STOP: 336 leader length: 765 |
| 11 | AGI number: AT1G01060.5 uORF ′5 STOP: 229 uORF 3′ STOP: 310 leader length: 765 |
| 12 | AGI number: AT1G01060.5 uORF ′5 STOP: 229 uORF 3′ STOP: 310 leader length: 765 |
| 13 | AGI number: AT1G01060.5 uORF ′5 STOP: 677 uORF 3′ STOP: 728 leader length: 765 |
| 14 | AGI number: AT1G01060.5 uORF ′5 STOP: 677 uORF 3′ STOP: 728 leader length: 765 |
| 15 | AGI number: AT1G01060.5 uORF ′5 STOP: 260 uORF 3′ STOP: 347 leader length: 765 |
| 16 | AGI number: AT1G01060.5 uORF ′5 STOP: 260 uORF 3′ STOP: 347 leader length: 765 |
| 17 | AGI number: AT1G01160.2 uORF ′5 STOP: 115 uORF 3′ STOP: 286 leader length: 226 |
| 18 | AGI number: AT1G01160.2 uORF ′5 STOP: 115 uORF 3′ STOP: 286 leader length: 226 |
| 19 | AGI number: AT1G01340.1 uORF ′5 STOP: 7 uORF 3′ STOP: 118 leader length: 204 |
| 20 | AGI number: AT1G01340.1 uORF ′5 STOP: 7 uORF 3′ STOP: 118 leader length: 204 |
| 21 | AGI number: AT1G01650.2 uORF ′5 STOP: 316 uORF 3′ STOP: 478 leader length: 676 |
| 22 | AGI number: AT1G01650.2 uORF ′5 STOP: 316 uORF 3′ STOP: 478 leader length: 676 |
| 23 | AGI number: AT1G01780.1 uORF ′5 STOP: 8 uORF 3′ STOP: 71 leader length: 158 |
| 24 | AGI number: AT1G01780.1 uORF ′5 STOP: 8 uORF 3′ STOP: 71 leader length: 158 |
| 25 | AGI number: AT1G01880.1 uORF ′5 STOP: 57 uORF 3′ STOP: 153 leader length: 118 |
| 26 | AGI number: AT1G01880.1 uORF ′5 STOP: 57 uORF 3′ STOP: 153 leader length: 118 |
| 27 | AGI number: AT1G02010.1 uORF ′5 STOP: 98 uORF 3′ STOP: 284 leader length: 155 |
| 28 | AGI number: AT1G02010.1 uORF ′5 STOP: 98 uORF 3′ STOP: 284 leader length: 155 |
| 29 | AGI number: AT1G02010.2 uORF ′5 STOP: 15 uORF 3′ STOP: 201 leader length: 72 |
| 30 | AGI number: AT1G02010.2 uORF ′5 STOP: 15 uORF 3′ STOP: 201 leader length: 72 |
| 31 | AGI number: AT1G02145.2 uORF ′5 STOP: 75 uORF 3′ STOP: 132 leader length: 228 |
| 32 | AGI number: AT1G02145.2 uORF ′5 STOP: 75 uORF 3′ STOP: 132 leader length: 228 |
| 33 | AGI number: AT1G02145.2 uORF ′5 STOP: 95 uORF 3′ STOP: 161 leader length: 228 |
| 34 | AGI number: AT1G02145.2 uORF ′5 STOP: 95 uORF 3′ STOP: 161 leader length: 228 |
| 35 | AGI number: AT1G02145.4 uORF ′5 STOP: 75 uORF 3′ STOP: 132 leader length: 228 |
| 36 | AGI number: AT1G02145.4 uORF ′5 STOP: 75 uORF 3′ STOP: 132 leader length: 228 |
| 37 | AGI number: AT1G02145.4 uORF ′5 STOP: 95 uORF 3′ STOP: 161 leader length: 228 |
| 38 | AGI number: AT1G02145.4 uORF ′5 STOP: 95 uORF 3′ STOP: 161 leader length: 228 |
| 39 | AGI number: AT1G02205.1 uORF ′5 STOP: 19 uORF 3′ STOP: 592 leader length: 688 |
| 40 | AGI number: AT1G02205.1 uORF ′5 STOP: 19 uORF 3′ STOP: 592 leader length: 688 |
| 41 | AGI number: AT1G02205.1 uORF ′5 STOP: 423 uORF 3′ STOP: 558 leader length: 688 |
| 42 | AGI number: AT1G02205.1 uORF ′5 STOP: 423 uORF 3′ STOP: 558 leader length: 688 |
| 43 | AGI number: AT1G02260.1 uORF ′5 STOP: 76 uORF 3′ STOP: 163 leader length: 321 |
| 44 | AGI number: AT1G02260.1 uORF ′5 STOP: 76 uORF 3′ STOP: 163 leader length: 321 |
| 45 | AGI number: AT1G02260.1 uORF ′5 STOP: 20 uORF 3′ STOP: 155 leader length: 321 |
| 46 | AGI number: AT1G02260.1 uORF ′5 STOP: 20 uORF 3′ STOP: 155 leader length: 321 |
| 17 | AGI number: AT1G02290.1 uORF ′5 STOP: 39 uORF 3′ STOP: 135 leader length: 244 |
| 48 | AGI number: AT1G02290.1 uORF ′5 STOP: 39 uORF 3′ STOP: 135 leader length: 244 |
| 49 | AGI number: AT1G02290.1 uORF ′5 STOP: 49 uORF 3′ STOP: 127 leader length: 244 |
| 50 | AGI number: AT1G02290.1 uORF ′5 STOP: 49 uORF 3′ STOP: 127 leader length: 244 |
| 51 | AGI number: AT1G02380.1 uORF ′5 STOP: 198 uORF 3′ STOP: 282 leader length: 304 |
| 52 | AGI number: AT1G02380.1 uORF ′5 STOP: 198 uORF 3′ STOP: 282 leader length: 304 |
| 53 | AGI number: AT1G02720.1 uORF ′5 STOP: 159 uORF 3′ STOP: 225 leader length: 289 |
| 54 | AGI number: AT1G02720.1 uORF ′5 STOP: 159 uORF 3′ STOP: 225 leader length: 289 |
| 55 | AGI number: AT1G02720.1 uORF ′5 STOP: 116 uORF 3′ STOP: 236 leader length: 289 |
| 56 | AGI number: AT1G02720.1 uORF ′5 STOP: 116 uORF 3′ STOP: 236 leader length: 289 |
| 57 | AGI number: AT1G02880.1 uORF ′5 STOP: 128 uORF 3′ STOP: 284 leader length: 456 |
| 58 | AGI number: AT1G02880.1 uORF ′5 STOP: 128 uORF 3′ STOP: 284 leader length: 456 |
| 59 | AGI number: AT1G02930.1 uORF ′5 STOP: 54 uORF 3′ STOP: 108 leader length: 236 |
| 60 | AGI number: AT1G02930.1 uORF ′5 STOP: 54 uORF 3′ STOP: 108 leader length: 236 |
| 61 | AGI number: AT1G03080.1 uORF ′5 STOP: 29 uORF 3′ STOP: 143 leader length: 351 |
| 62 | AGI number: AT1G03080.1 uORF ′5 STOP: 29 uORF 3′ STOP: 143 leader length: 351 |
| 63 | AGI number: AT1G03310.1 uORF ′5 STOP: 49 uORF 3′ STOP: 124 leader length: 157 |
| 64 | AGI number: AT1G03310.1 uORF ′5 STOP: 49 uORF 3′ STOP: 124 leader length: 157 |
| 65 | AGI number: AT1G03860.2 uORF ′5 STOP: 201 uORF 3′ STOP: 291 leader length: 386 |
| 66 | AGI number: AT1G03860.2 uORF ′5 STOP: 201 uORF 3′ STOP: 291 leader length: 386 |
| 67 | AGI number: AT1G03860.2 uORF ′5 STOP: 101 uORF 3′ STOP: 254 leader length: 386 |
| 68 | AGI number: AT1G03860.2 uORF ′5 STOP: 101 uORF 3′ STOP: 254 leader length: 386 |
| 69 | AGI number: AT1G03930.1 uORF ′5 STOP: 105 uORF 3′ STOP: 183 leader length: 670 |
| 70 | AGI number: AT1G03930.1 uORF ′5 STOP: 105 uORF 3′ STOP: 183 leader length: 670 |
| 71 | AGI number: AT1G03930.1 uORF ′5 STOP: 518 uORF 3′ STOP: 578 leader length: 670 |
| 72 | AGI number: AT1G03930.1 uORF ′5 STOP: 518 uORF 3′ STOP: 578 leader length: 670 |
| 73 | AGI number: AT1G03960.1 uORF ′5 STOP: 196 uORF 3′ STOP: 277 leader length: 370 |
| 74 | AGI number: AT1G03960.1 uORF ′5 STOP: 196 uORF 3′ STOP: 277 leader length: 370 |
| 75 | AGI number: AT1G03960.2 uORF ′5 STOP: 196 uORF 3′ STOP: 277 leader length: 942 |
| 76 | AGI number: AT1G03960.2 uORF ′5 STOP: 196 uORF 3′ STOP: 277 leader length: 942 |
| 77 | AGI number: AT1G03980.1 uORF ′5 STOP: 233 uORF 3′ STOP: 287 leader length: 237 |
| 78 | AGI number: AT1G03980.1 uORF ′5 STOP: 233 uORF 3′ STOP: 287 leader length: 237 |
| 79 | AGI number: AT1G04120.1 uORF ′5 STOP: 25 uORF 3′ STOP: 88 leader length: 338 |
| 80 | AGI number: AT1G04120.1 uORF ′5 STOP: 25 uORF 3′ STOP: 88 leader length: 338 |
| 81 | AGI number: AT1G04120.2 uORF ′5 STOP: 145 uORF 3′ STOP: 208 leader length: 458 |
| 82 | AGI number: AT1G04120.2 uORF ′5 STOP: 145 uORF 3′ STOP: 208 leader length: 458 |
| 83 | AGI number: AT1G04140.1 uORF ′5 STOP: 46 uORF 3′ STOP: 121 leader length: 309 |
| 84 | AGI number: AT1G04140.1 uORF ′5 STOP: 46 uORF 3′ STOP: 121 leader length: 309 |
| 85 | AGI number: AT1G04140.2 uORF ′5 STOP: 46 uORF 3′ STOP: 121 leader length: 309 |
| 86 | AGI number: AT1G04140.2 uORF ′5 STOP: 46 uORF 3′ STOP: 121 leader length: 309 |
| 87 | AGI number: AT1G04300.2 uORF ′5 STOP: 384 uORF 3′ STOP: 696 leader length: 630 |
| 88 | AGI number: AT1G04300.2 uORF ′5 STOP: 384 uORF 3′ STOP: 696 leader length: 630 |
| 89 | AGI number: AT1G04300.2 uORF ′5 STOP: 394 uORF 3′ STOP: 448 leader length: 630 |
| 90 | AGI number: AT1G04300.2 uORF ′5 STOP: 394 uORF 3′ STOP: 448 leader length: 630 |
| 91 | AGI number: AT1G04440.1 uORF ′5 STOP: 143 uORF 3′ STOP: 245 leader length: 560 |
| 92 | AGI number: AT1G04440.1 uORF ′5 STOP: 143 uORF 3′ STOP: 245 leader length: 560 |
| 93 | AGI number: AT1G04778.1 uORF ′5 STOP: 30 uORF 3′ STOP: 117 leader length: 55 |
| 94 | AGI number: AT1G04778.1 uORF ′5 STOP: 30 uORF 3′ STOP: 117 leader length: 55 |
| 95 | AGI number: AT1G04960.2 uORF ′5 STOP: 44 uORF 3′ STOP: 269 leader length: 444 |
| 96 | AGI number: AT1G04960.2 uORF ′5 STOP: 44 uORF 3′ STOP: 269 leader length: 444 |
| 97 | AGI number: AT1G04960.2 uORF ′5 STOP: 117 uORF 3′ STOP: 228 leader length: 444 |
| 98 | AGI number: AT1G04960.2 uORF ′5 STOP: 117 uORF 3′ STOP: 228 leader length: 444 |
| 99 | AGI number: AT1G05160.1 uORF ′5 STOP: 334 uORF 3′ STOP: 448 leader length: 343 |
| 100 | AGI number: AT1G05160.1 uORF ′5 STOP: 334 uORF 3′ STOP: 448 leader length: 343 |
| 101 | AGI number: AT1G05200.2 uORF ′5 STOP: 162 uORF 3′ STOP: 228 leader length: 275 |
| 102 | AGI number: AT1G05200.2 uORF ′5 STOP: 162 uORF 3′ STOP: 228 leader length: 275 |
| 103 | AGI number: AT1G05230.4 uORF ′5 STOP: 244 uORF 3′ STOP: 316 leader length: 401 |
| 104 | AGI number: AT1G05230.4 uORF ′5 STOP: 244 uORF 3′ STOP: 316 leader length: 401 |
| 105 | AGI number: AT1G05690.1 uORF ′5 STOP: 188 uORF 3′ STOP: 359 leader length: 350 |
| 106 | AGI number: AT1G05690.1 uORF ′5 STOP: 188 uORF 3′ STOP: 359 leader length: 350 |
| 107 | AGI number: AT1G05710.5 uORF ′5 STOP: 317 uORF 3′ STOP: 383 leader length: 476 |
| 108 | AGI number: AT1G05710.5 uORF ′5 STOP: 317 uORF 3′ STOP: 383 leader length: 476 |
| 109 | AGI number: AT1G05730.1 uORF ′5 STOP: 78 uORF 3′ STOP: 339 leader length: 552 |
| 110 | AGI number: AT1G05730.1 uORF ′5 STOP: 78 uORF 3′ STOP: 339 leader length: 552 |
| 111 | AGI number: AT1G05730.1 uORF ′5 STOP: 260 uORF 3′ STOP: 335 leader length: 552 |
| 112 | AGI number: AT1G05730.1 uORF ′5 STOP: 260 uORF 3′ STOP: 335 leader length: 552 |
| 113 | AGI number: AT1G06149.1 uORF ′5 STOP: 94 uORF 3′ STOP: 172 leader length: 254 |
| 114 | AGI number: AT1G06149.1 uORF ′5 STOP: 94 uORF 3′ STOP: 172 leader length: 254 |
| 115 | AGI number: AT1G06149.1 uORF ′5 STOP: 20 uORF 3′ STOP: 167 leader length: 254 |
| 116 | AGI number: AT1G06149.1 uORF ′5 STOP: 20 uORF 3′ STOP: 167 leader length: 254 |
| 117 | AGI number: AT1G06150.2 uORF ′5 STOP: 228 uORF 3′ STOP: 360 leader length: 524 |
| 118 | AGI number: AT1G06150.2 uORF ′5 STOP: 228 uORF 3′ STOP: 360 leader length: 524 |
| 119 | AGI number: AT1G06150.2 uORF ′5 STOP: 20 uORF 3′ STOP: 167 leader length: 524 |
| 120 | AGI number: AT1G06150.2 uORF ′5 STOP: 20 uORF 3′ STOP: 167 leader length: 524 |
| 121 | AGI number: AT1G06150.2 uORF ′5 STOP: 94 uORF 3′ STOP: 172 leader length: 524 |
| 122 | AGI number: AT1G06150.2 uORF ′5 STOP: 94 uORF 3′ STOP: 172 leader length: 524 |
| 123 | AGI number: AT1G06270.1 uORF ′5 STOP: 231 uORF 3′ STOP: 351 leader length: 334 |
| 124 | AGI number: AT1G06270.1 uORF ′5 STOP: 231 uORF 3′ STOP: 351 leader length: 334 |
| 125 | AGI number: AT1G06270.1 uORF ′5 STOP: 307 uORF 3′ STOP: 391 leader length: 334 |
| 126 | AGI number: AT1G06270.1 uORF ′5 STOP: 307 uORF 3′ STOP: 391 leader length: 334 |
| 127 | AGI number: AT1G06780.2 uORF ′5 STOP: 372 uORF 3′ STOP: 474 leader length: 378 |
| 128 | AGI number: AT1G06780.2 uORF ′5 STOP: 372 uORF 3′ STOP: 474 leader length: 378 |
| 129 | AGI number: AT1G07030.1 uORF ′5 STOP: 113 uORF 3′ STOP: 164 leader length: 285 |
| 130 | AGI number: AT1G07030.1 uORF ′5 STOP: 113 uORF 3′ STOP: 164 leader length: 285 |
| 131 | AGI number: AT1G07590.1 uORF ′5 STOP: 41 uORF 3′ STOP: 209 leader length: 630 |
| 132 | AGI number: AT1G07590.1 uORF ′5 STOP: 41 uORF 3′ STOP: 209 leader length: 630 |
| 133 | AGI number: AT1G07590.1 uORF ′5 STOP: 63 uORF 3′ STOP: 228 leader length: 630 |
| 134 | AGI number: AT1G07590.1 uORF ′5 STOP: 63 uORF 3′ STOP: 228 leader length: 630 |
| 135 | AGI number: AT1G07590.1 uORF ′5 STOP: 343 uORF 3′ STOP: 397 leader length: 630 |
| 136 | AGI number: AT1G07590.1 uORF ′5 STOP: 343 uORF 3′ STOP: 397 leader length: 630 |
| 137 | AGI number: AT1G07700.3 uORF ′5 STOP: 358 uORF 3′ STOP: 553 leader length: 650 |
| 138 | AGI number: AT1G07700.3 uORF ′5 STOP: 358 uORF 3′ STOP: 553 leader length: 650 |
| 139 | AGI number: AT1G07700.3 uORF ′5 STOP: 441 uORF 3′ STOP: 558 leader length: 650 |
| 140 | AGI number: AT1G07700.3 uORF ′5 STOP: 441 uORF 3′ STOP: 558 leader length: 650 |
| 141 | AGI number: AT1G07700.3 uORF ′5 STOP: 582 uORF 3′ STOP: 633 leader length: 650 |
| 142 | AGI number: AT1G07700.3 uORF ′5 STOP: 582 uORF 3′ STOP: 633 leader length: 650 |
| 143 | AGI number: AT1G07780.2 uORF ′5 STOP: 11 uORF 3′ STOP: 71 leader length: 160 |
| 144 | AGI number: AT1G07780.2 uORF ′5 STOP: 11 uORF 3′ STOP: 71 leader length: 160 |
| 145 | AGI number: AT1G07960.2 uORF ′5 STOP: 45 uORF 3′ STOP: 114 leader length: 492 |
| 146 | AGI number: AT1G07960.2 uORF ′5 STOP: 45 uORF 3′ STOP: 114 leader length: 492 |
| 147 | AGI number: AT1G08030.1 uORF ′5 STOP: 55 uORF 3′ STOP: 166 leader length: 267 |
| 148 | AGI number: AT1G08030.1 uORF ′5 STOP: 55 uORF 3′ STOP: 166 leader length: 267 |
| 149 | AGI number: AT1G08600.3 uORF ′5 STOP: 213 uORF 3′ STOP: 270 leader length: 231 |
| 150 | AGI number: AT1G08600.3 uORF ′5 STOP: 213 uORF 3′ STOP: 270 leader length: 231 |
| 151 | AGI number: AT1G08620.1 uORF ′5 STOP: 31 uORF 3′ STOP: 97 leader length: 304 |
| 152 | AGI number: AT1G08620.1 uORF ′5 STOP: 31 uORF 3′ STOP: 97 leader length: 304 |
| 153 | AGI number: AT1G08820.1 uORF ′5 STOP: 20 uORF 3′ STOP: 92 leader length: 297 |
| 154 | AGI number: AT1G08820.1 uORF ′5 STOP: 20 uORF 3′ STOP: 92 leader length: 297 |
| 155 | AGI number: AT1G09180.1 uORF ′5 STOP: 99 uORF 3′ STOP: 168 leader length: 124 |
| 156 | AGI number: AT1G09180.1 uORF ′5 STOP: 99 uORF 3′ STOP: 168 leader length: 124 |
| 157 | AGI number: AT1G09300.2 uORF ′5 STOP: 98 uORF 3′ STOP: 266 leader length: 658 |
| 158 | AGI number: AT1G09300.2 uORF ′5 STOP: 98 uORF 3′ STOP: 266 leader length: 658 |
| 159 | AGI number: AT1G09840.1 uORF ′5 STOP: 158 uORF 3′ STOP: 299 leader length: 343 |
| 160 | AGI number: AT1G09840.1 uORF ′5 STOP: 158 uORF 3′ STOP: 299 leader length: 343 |
| 161 | AGI number: AT1G09840.2 uORF ′5 STOP: 68 uORF 3′ STOP: 191 leader length: 235 |
| 162 | AGI number: AT1G09840.2 uORF ′5 STOP: 68 uORF 3′ STOP: 191 leader length: 235 |
| 163 | AGI number: AT1G09840.6 uORF ′5 STOP: 113 uORF 3′ STOP: 173 leader length: 364 |
| 164 | AGI number: AT1G09840.6 uORF ′5 STOP: 113 uORF 3′ STOP: 173 leader length: 364 |
| 165 | AGI number: AT1G10120.1 uORF ′5 STOP: 25 uORF 3′ STOP: 157 leader length: 840 |
| 166 | AGI number: AT1G10120.1 uORF ′5 STOP: 25 uORF 3′ STOP: 157 leader length: 840 |
| 167 | AGI number: AT1G10522.1 uORF ′5 STOP: 106 uORF 3′ STOP: 217 leader length: 243 |
| 168 | AGI number: AT1G10522.1 uORF ′5 STOP: 106 uORF 3′ STOP: 217 leader length: 243 |
| 169 | AGI number: AT1G10522.1 uORF ′5 STOP: 143 uORF 3′ STOP: 200 leader length: 243 |
| 170 | AGI number: AT1G10522.1 uORF ′5 STOP: 143 uORF 3′ STOP: 200 leader length: 243 |
| 171 | AGI number: AT1G10522.2 uORF ′5 STOP: 74 uORF 3′ STOP: 185 leader length: 259 |
| 172 | AGI number: AT1G10522.2 uORF ′5 STOP: 74 uORF 3′ STOP: 185 leader length: 259 |
| 173 | AGI number: AT1G10650.2 uORF ′5 STOP: 333 uORF 3′ STOP: 528 leader length: 653 |
| 174 | AGI number: AT1G10650.2 uORF ′5 STOP: 333 uORF 3′ STOP: 528 leader length: 653 |
| 175 | AGI number: AT1G10650.2 uORF ′5 STOP: 341 uORF 3′ STOP: 509 leader length: 653 |
| 176 | AGI number: AT1G10650.2 uORF ′5 STOP: 341 uORF 3′ STOP: 509 leader length: 653 |
| 177 | AGI number: AT1G10740.1 uORF ′5 STOP: 27 uORF 3′ STOP: 195 leader length: 294 |
| 178 | AGI number: AT1G10740.1 uORF ′5 STOP: 27 uORF 3′ STOP: 195 leader length: 294 |
| 179 | AGI number: AT1G10740.2 uORF ′5 STOP: 143 uORF 3′ STOP: 203 leader length: 294 |
| 180 | AGI number: AT1G10740.2 uORF ′5 STOP: 143 uORF 3′ STOP: 203 leader length: 294 |
| 181 | AGI number: AT1G10740.2 uORF ′5 STOP: 27 uORF 3′ STOP: 195 leader length: 294 |
| 182 | AGI number: AT1G10740.2 uORF ′5 STOP: 27 uORF 3′ STOP: 195 leader length: 294 |
| 183 | AGI number: AT1G10740.3 uORF ′5 STOP: 105 uORF 3′ STOP: 273 leader length: 372 |
| 184 | AGI number: AT1G10740.3 uORF ′5 STOP: 105 uORF 3′ STOP: 273 leader length: 372 |
| 185 | AGI number: AT1G11170.1 uORF ′5 STOP: 88 uORF 3′ STOP: 148 leader length: 230 |
| 186 | AGI number: AT1G11170.1 uORF ′5 STOP: 88 uORF 3′ STOP: 148 leader length: 230 |
| 187 | AGI number: AT1G11270.1 uORF ′5 STOP: 60 uORF 3′ STOP: 120 leader length: 214 |
| 188 | AGI number: AT1G11270.1 uORF ′5 STOP: 60 uORF 3′ STOP: 120 leader length: 214 |
| 189 | AGI number: AT1G11270.1 uORF ′5 STOP: 65 uORF 3′ STOP: 125 leader length: 214 |
| 190 | AGI number: AT1G11270.1 uORF ′5 STOP: 65 uORF 3′ STOP: 125 leader length: 214 |
| 191 | AGI number: AT1G11450.1 uORF ′5 STOP: 188 uORF 3′ STOP: 305 leader length: 524 |
| 192 | AGI number: AT1G11450.1 uORF ′5 STOP: 188 uORF 3′ STOP: 305 leader length: 524 |
| 193 | AGI number: AT1G11755.1 uORF ′5 STOP: 16 uORF 3′ STOP: 172 leader length: 260 |
| 194 | AGI number: AT1G11755.1 uORF ′5 STOP: 16 uORF 3′ STOP: 172 leader length: 260 |
| 195 | AGI number: AT1G11790.1 uORF ′5 STOP: 86 uORF 3′ STOP: 146 leader length: 228 |
| 196 | AGI number: AT1G11790.1 uORF ′5 STOP: 86 uORF 3′ STOP: 146 leader length: 228 |
| 197 | AGI number: AT1G12260.1 uORF ′5 STOP: 253 uORF 3′ STOP: 361 leader length: 457 |
| 198 | AGI number: AT1G12260.1 uORF ′5 STOP: 253 uORF 3′ STOP: 361 leader length: 457 |
| 199 | AGI number: AT1G12380.1 uORF ′5 STOP: 100 uORF 3′ STOP: 163 leader length: 252 |
| 200 | AGI number: AT1G12380.1 uORF ′5 STOP: 100 uORF 3′ STOP: 163 leader length: 252 |
| 201 | AGI number: AT1G12440.2 uORF ′5 STOP: 79 uORF 3′ STOP: 133 leader length: 641 |
| 202 | AGI number: AT1G12440.2 uORF ′5 STOP: 79 uORF 3′ STOP: 133 leader length: 641 |
| 203 | AGI number: AT1G12440.2 uORF ′5 STOP: 352 uORF 3′ STOP: 424 leader length: 641 |
| 204 | AGI number: AT1G12440.2 uORF ′5 STOP: 352 uORF 3′ STOP: 424 leader length: 641 |
| 205 | AGI number: AT1G12440.2 uORF ′5 STOP: 14 uORF 3′ STOP: 161 leader length: 641 |
| 206 | AGI number: AT1G12440.2 uORF ′5 STOP: 14 uORF 3′ STOP: 161 leader length: 641 |
| 207 | AGI number: AT1G12520.2 uORF ′5 STOP: 58 uORF 3′ STOP: 283 leader length: 368 |
| 208 | AGI number: AT1G12520.2 uORF ′5 STOP: 58 uORF 3′ STOP: 283 leader length: 368 |
| 209 | AGI number: AT1G12520.2 uORF ′5 STOP: 239 uORF 3′ STOP: 296 leader length: 368 |
| 210 | AGI number: AT1G12520.2 uORF ′5 STOP: 239 uORF 3′ STOP: 296 leader length: 368 |
| 211 | AGI number: AT1G12800.1 uORF ′5 STOP: 67 uORF 3′ STOP: 136 leader length: 142 |
| 212 | AGI number: AT1G12800.1 uORF ′5 STOP: 67 uORF 3′ STOP: 136 leader length: 142 |
| 213 | AGI number: AT1G12900.4 uORF ′5 STOP: 162 uORF 3′ STOP: 225 leader length: 304 |
| 214 | AGI number: AT1G12900.4 uORF ′5 STOP: 162 uORF 3′ STOP: 225 leader length: 304 |
| 215 | AGI number: AT1G12990.1 uORF ′5 STOP: 107 uORF 3′ STOP: 203 leader length: 333 |
| 216 | AGI number: AT1G12990.1 uORF ′5 STOP: 107 uORF 3′ STOP: 203 leader length: 333 |
| 217 | AGI number: AT1G13120.1 uORF ′5 STOP: 243 uORF 3′ STOP: 321 leader length: 438 |
| 218 | AGI number: AT1G13120.1 uORF ′5 STOP: 243 uORF 3′ STOP: 321 leader length: 438 |
| 219 | AGI number: AT1G13120.1 uORF ′5 STOP: 142 uORF 3′ STOP: 325 leader length: 438 |
| 220 | AGI number: AT1G13120.1 uORF ′5 STOP: 142 uORF 3′ STOP: 325 leader length: 438 |
| 221 | AGI number: AT1G13195.2 uORF ′5 STOP: 104 uORF 3′ STOP: 299 leader length: 688 |
| 222 | AGI number: AT1G13195.2 uORF ′5 STOP: 104 uORF 3′ STOP: 299 leader length: 688 |
| 223 | AGI number: AT1G13370.1 uORF ′5 STOP: 82 uORF 3′ STOP: 244 leader length: 91 |
| 224 | AGI number: AT1G13370.1 uORF ′5 STOP: 82 uORF 3′ STOP: 244 leader length: 91 |
| 225 | AGI number: AT1G13370.1 uORF ′5 STOP: 66 uORF 3′ STOP: 279 leader length: 91 |
| 226 | AGI number: AT1G13370.1 uORF ′5 STOP: 66 uORF 3′ STOP: 279 leader length: 91 |
| 227 | AGI number: AT1G13460.2 uORF ′5 STOP: 31 uORF 3′ STOP: 148 leader length: 323 |
| 228 | AGI number: AT1G13460.2 uORF ′5 STOP: 31 uORF 3′ STOP: 148 leader length: 323 |
| 229 | AGI number: AT1G13640.1 uORF ′5 STOP: 92 uORF 3′ STOP: 281 leader length: 371 |
| 230 | AGI number: AT1G13640.1 uORF ′5 STOP: 92 uORF 3′ STOP: 281 leader length: 371 |
| 231 | AGI number: AT1G13860.1 uORF ′5 STOP: 389 uORF 3′ STOP: 443 leader length: 562 |
| 232 | AGI number: AT1G13860.1 uORF ′5 STOP: 389 uORF 3′ STOP: 443 leader length: 562 |
| 233 | AGI number: AT1G13860.3 uORF ′5 STOP: 344 uORF 3′ STOP: 398 leader length: 517 |
| 234 | AGI number: AT1G13860.3 uORF ′5 STOP: 344 uORF 3′ STOP: 398 leader length: 517 |
| 235 | AGI number: AT1G13910.1 uORF ′5 STOP: 58 uORF 3′ STOP: 148 leader length: 171 |
| 236 | AGI number: AT1G13910.1 uORF ′5 STOP: 58 uORF 3′ STOP: 148 leader length: 171 |
| 237 | AGI number: AT1G13970.1 uORF ′5 STOP: 155 uORF 3′ STOP: 233 leader length: 316 |
| 238 | AGI number: AT1G13970.1 uORF ′5 STOP: 155 uORF 3′ STOP: 233 leader length: 316 |
| 239 | AGI number: AT1G14020.1 uORF ′5 STOP: 9 uORF 3′ STOP: 222 leader length: 210 |
| 240 | AGI number: AT1G14020.1 uORF ′5 STOP: 9 uORF 3′ STOP: 222 leader length: 210 |
| 241 | AGI number: AT1G14180.2 uORF ′5 STOP: 160 uORF 3′ STOP: 247 leader length: 475 |
| 242 | AGI number: AT1G14180.2 uORF ′5 STOP: 160 uORF 3′ STOP: 247 leader length: 475 |
| 243 | AGI number: AT1G14270.2 uORF ′5 STOP: 196 uORF 3′ STOP: 385 leader length: 572 |
| 244 | AGI number: AT1G14270.2 uORF ′5 STOP: 196 uORF 3′ STOP: 385 leader length: 572 |
| 245 | AGI number: AT1G14560.1 uORF ′5 STOP: 397 uORF 3′ STOP: 619 leader length: 628 |
| 246 | AGI number: AT1G14560.1 uORF ′5 STOP: 397 uORF 3′ STOP: 619 leader length: 628 |
| 247 | AGI number: AT1G14590.1 uORF ′5 STOP: 5 uORF 3′ STOP: 95 leader length: 26 |
| 248 | AGI number: AT1G14590.1 uORF ′5 STOP: 5 uORF 3′ STOP: 95 leader length: 26 |
| 249 | AGI number: AT1G14685.3 uORF ′5 STOP: 298 uORF 3′ STOP: 361 leader length: 498 |
| 250 | AGI number: AT1G14685.3 uORF ′5 STOP: 298 uORF 3′ STOP: 361 leader length: 498 |
| 251 | AGI number: AT1G14820.1 uORF ′5 STOP: 133 uORF 3′ STOP: 235 leader length: 305 |
| 252 | AGI number: AT1G14820.1 uORF ′5 STOP: 133 uORF 3′ STOP: 235 leader length: 305 |
| 253 | AGI number: AT1G15490.1 uORF ′5 STOP: 216 uORF 3′ STOP: 357 leader length: 473 |
| 254 | AGI number: AT1G15490.1 uORF ′5 STOP: 216 uORF 3′ STOP: 357 leader length: 473 |
| 255 | AGI number: AT1G15750.3 uORF ′5 STOP: 160 uORF 3′ STOP: 259 leader length: 437 |
| 256 | AGI number: AT1G15750.3 uORF ′5 STOP: 160 uORF 3′ STOP: 259 leader length: 437 |
| 257 | AGI number: AT1G15920.2 uORF ′5 STOP: 237 uORF 3′ STOP: 345 leader length: 441 |
| 258 | AGI number: AT1G15920.2 uORF ′5 STOP: 237 uORF 3′ STOP: 345 leader length: 441 |
| 259 | AGI number: AT1G15920.2 uORF ′5 STOP: 302 uORF 3′ STOP: 356 leader length: 441 |
| 260 | AGI number: AT1G15920.2 uORF ′5 STOP: 302 uORF 3′ STOP: 356 leader length: 441 |
| 261 | AGI number: AT1G15920.2 uORF ′5 STOP: 151 uORF 3′ STOP: 319 leader length: 441 |
| 262 | AGI number: AT1G15920.2 uORF ′5 STOP: 151 uORF 3′ STOP: 319 leader length: 441 |
| 263 | AGI number: AT1G15970.1 uORF ′5 STOP: 138 uORF 3′ STOP: 231 leader length: 374 |
| 264 | AGI number: AT1G15970.1 uORF ′5 STOP: 138 uORF 3′ STOP: 231 leader length: 374 |
| 265 | AGI number: AT1G15970.1 uORF ′5 STOP: 170 uORF 3′ STOP: 236 leader length: 374 |
| 266 | AGI number: AT1G15970.1 uORF ′5 STOP: 170 uORF 3′ STOP: 236 leader length: 374 |
| 267 | AGI number: AT1G16060.2 uORF ′5 STOP: 197 uORF 3′ STOP: 254 leader length: 460 |
| 268 | AGI number: AT1G16060.2 uORF ′5 STOP: 197 uORF 3′ STOP: 254 leader length: 460 |
| 269 | AGI number: AT1G16250.1 uORF ′5 STOP: 78 uORF 3′ STOP: 135 leader length: 225 |
| 270 | AGI number: AT1G16250.1 uORF ′5 STOP: 78 uORF 3′ STOP: 135 leader length: 225 |
| 271 | AGI number: AT1G17040.1 uORF ′5 STOP: 9 uORF 3′ STOP: 72 leader length: 261 |
| 272 | AGI number: AT1G17040.1 uORF ′5 STOP: 9 uORF 3′ STOP: 72 leader length: 261 |
| 273 | AGI number: AT1G17040.2 uORF ′5 STOP: 260 uORF 3′ STOP: 386 leader length: 261 |
| 274 | AGI number: AT1G17040.2 uORF ′5 STOP: 260 uORF 3′ STOP: 386 leader length: 261 |
| 275 | AGI number: AT1G17680.1 uORF ′5 STOP: 77 uORF 3′ STOP: 242 leader length: 311 |
| 276 | AGI number: AT1G17680.1 uORF ′5 STOP: 77 uORF 3′ STOP: 242 leader length: 311 |
| 277 | AGI number: AT1G17720.1 uORF ′5 STOP: 183 uORF 3′ STOP: 237 leader length: 318 |
| 278 | AGI number: AT1G17720.1 uORF ′5 STOP: 183 uORF 3′ STOP: 237 leader length: 318 |
| 279 | AGI number: AT1G17720.1 uORF ′5 STOP: 163 uORF 3′ STOP: 241 leader length: 318 |
| 280 | AGI number: AT1G17720.1 uORF ′5 STOP: 163 uORF 3′ STOP: 241 leader length: 318 |
| 281 | AGI number: AT1G17720.2 uORF ′5 STOP: 120 uORF 3′ STOP: 198 leader length: 275 |
| 282 | AGI number: AT1G17720.2 uORF ′5 STOP: 120 uORF 3′ STOP: 198 leader length: 275 |
| 283 | AGI number: AT1G17720.2 uORF ′5 STOP: 140 uORF 3′ STOP: 194 leader length: 275 |
| 284 | AGI number: AT1G17720.2 uORF ′5 STOP: 140 uORF 3′ STOP: 194 leader length: 275 |
| 285 | AGI number: AT1G17780.1 uORF ′5 STOP: 382 uORF 3′ STOP: 457 leader length: 602 |
| 286 | AGI number: AT1G17780.1 uORF ′5 STOP: 382 uORF 3′ STOP: 457 leader length: 602 |
| 287 | AGI number: AT1G17890.2 uORF ′5 STOP: 80 uORF 3′ STOP: 137 leader length: 241 |
| 288 | AGI number: AT1G17890.2 uORF ′5 STOP: 80 uORF 3′ STOP: 137 leader length: 241 |
| 289 | AGI number: AT1G17920.1 uORF ′5 STOP: 190 uORF 3′ STOP: 250 leader length: 349 |
| 290 | AGI number: AT1G17920.1 uORF ′5 STOP: 190 uORF 3′ STOP: 250 leader length: 349 |
| 291 | AGI number: AT1G17980.2 uORF ′5 STOP: 364 uORF 3′ STOP: 442 leader length: 706 |
| 292 | AGI number: AT1G17980.2 uORF ′5 STOP: 364 uORF 3′ STOP: 442 leader length: 706 |
| 293 | AGI number: AT1G17980.2 uORF ′5 STOP: 369 uORF 3′ STOP: 468 leader length: 706 |
| 294 | AGI number: AT1G17980.2 uORF ′5 STOP: 369 uORF 3′ STOP: 468 leader length: 706 |
| 295 | AGI number: AT1G17990.1 uORF ′5 STOP: 177 uORF 3′ STOP: 246 leader length: 338 |
| 296 | AGI number: AT1G17990.1 uORF ′5 STOP: 177 uORF 3′ STOP: 246 leader length: 338 |
| 297 | AGI number: AT1G17990.2 uORF ′5 STOP: 76 uORF 3′ STOP: 145 leader length: 237 |
| 298 | AGI number: AT1G17990.2 uORF ′5 STOP: 76 uORF 3′ STOP: 145 leader length: 237 |
| 299 | AGI number: AT1G18160.1 uORF ′5 STOP: 102 uORF 3′ STOP: 183 leader length: 333 |
| 300 | AGI number: AT1G18160.1 uORF ′5 STOP: 102 uORF 3′ STOP: 183 leader length: 333 |
| 301 | AGI number: AT1G18330.2 uORF ′5 STOP: 92 uORF 3′ STOP: 182 leader length: 292 |
| 302 | AGI number: AT1G18330.2 uORF ′5 STOP: 92 uORF 3′ STOP: 182 leader length: 292 |
| 303 | AGI number: AT1G18570.1 uORF ′5 STOP: 126 uORF 3′ STOP: 225 leader length: 354 |
| 304 | AGI number: AT1G18570.1 uORF ′5 STOP: 126 uORF 3′ STOP: 225 leader length: 354 |
| 305 | AGI number: AT1G18690.1 uORF ′5 STOP: 35 uORF 3′ STOP: 296 leader length: 502 |
| 306 | AGI number: AT1G18690.1 uORF ′5 STOP: 35 uORF 3′ STOP: 296 leader length: 502 |
| 307 | AGI number: AT1G18750.1 uORF ′5 STOP: 154 uORF 3′ STOP: 229 leader length: 412 |
| 308 | AGI number: AT1G18750.1 uORF ′5 STOP: 154 uORF 3′ STOP: 229 leader length: 412 |
| 309 | AGI number: AT1G18840.2 uORF ′5 STOP: 100 uORF 3′ STOP: 160 leader length: 395 |
| 310 | AGI number: AT1G18840.2 uORF ′5 STOP: 100 uORF 3′ STOP: 160 leader length: 395 |
| 311 | AGI number: AT1G19220.1 uORF ′5 STOP: 120 uORF 3′ STOP: 198 leader length: 308 |
| 312 | AGI number: AT1G19220.1 uORF ′5 STOP: 120 uORF 3′ STOP: 198 leader length: 308 |
| 313 | AGI number: AT1G19220.1 uORF ′5 STOP: 155 uORF 3′ STOP: 221 leader length: 308 |
| 314 | AGI number: AT1G19220.1 uORF ′5 STOP: 155 uORF 3′ STOP: 221 leader length: 308 |
| 315 | AGI number: AT1G19330.1 uORF ′5 STOP: 110 uORF 3′ STOP: 170 leader length: 239 |
| 316 | AGI number: AT1G19330.1 uORF ′5 STOP: 110 uORF 3′ STOP: 170 leader length: 239 |
| 317 | AGI number: AT1G19370.1 uORF ′5 STOP: 64 uORF 3′ STOP: 154 leader length: 213 |
| 318 | AGI number: AT1G19370.1 uORF ′5 STOP: 64 uORF 3′ STOP: 154 leader length: 213 |
| 319 | AGI number: AT1G19396.3 uORF ′5 STOP: 38 uORF 3′ STOP: 209 leader length: 95 |
| 320 | AGI number: AT1G19396.3 uORF ′5 STOP: 38 uORF 3′ STOP: 209 leader length: 95 |
| 321 | AGI number: AT1G19400.1 uORF ′5 STOP: 301 uORF 3′ STOP: 409 leader length: 571 |
| 322 | AGI number: AT1G19400.1 uORF ′5 STOP: 301 uORF 3′ STOP: 409 leader length: 571 |
| 323 | AGI number: AT1G19450.1 uORF ′5 STOP: 10 uORF 3′ STOP: 61 leader length: 249 |
| 324 | AGI number: AT1G19450.1 uORF ′5 STOP: 10 uORF 3′ STOP: 61 leader length: 249 |
| 325 | AGI number: AT1G19700.2 uORF ′5 STOP: 59 uORF 3′ STOP: 164 leader length: 361 |
| 326 | AGI number: AT1G19700.2 uORF ′5 STOP: 59 uORF 3′ STOP: 164 leader length: 361 |
| 327 | AGI number: AT1G19800.3 uORF ′5 STOP: 45 uORF 3′ STOP: 102 leader length: 266 |
| 328 | AGI number: AT1G19800.3 uORF ′5 STOP: 45 uORF 3′ STOP: 102 leader length: 266 |
| 329 | AGI number: AT1G20550.1 uORF ′5 STOP: 3 uORF 3′ STOP: 354 leader length: 225 |
| 330 | AGI number: AT1G20550.1 uORF ′5 STOP: 3 uORF 3′ STOP: 354 leader length: 225 |
| 331 | AGI number: AT1G20650.1 uORF ′5 STOP: 34 uORF 3′ STOP: 145 leader length: 504 |
| 332 | AGI number: AT1G20650.1 uORF ′5 STOP: 34 uORF 3′ STOP: 145 leader length: 504 |
| 333 | AGI number: AT1G20880.1 uORF ′5 STOP: 85 uORF 3′ STOP: 391 leader length: 604 |
| 334 | AGI number: AT1G20880.1 uORF ′5 STOP: 85 uORF 3′ STOP: 391 leader length: 604 |
| 335 | AGI number: AT1G20880.1 uORF ′5 STOP: 459 uORF 3′ STOP: 513 leader length: 604 |
| 336 | AGI number: AT1G20880.1 uORF ′5 STOP: 459 uORF 3′ STOP: 513 leader length: 604 |
| 337 | AGI number: AT1G21160.1 uORF ′5 STOP: 179 uORF 3′ STOP: 377 leader length: 279 |
| 338 | AGI number: AT1G21160.1 uORF ′5 STOP: 179 uORF 3′ STOP: 377 leader length: 279 |
| 339 | AGI number: AT1G21350.1 uORF ′5 STOP: 92 uORF 3′ STOP: 227 leader length: 420 |
| 340 | AGI number: AT1G21350.1 uORF ′5 STOP: 92 uORF 3′ STOP: 227 leader length: 420 |
| 341 | AGI number: AT1G21560.1 uORF ′5 STOP: 12 uORF 3′ STOP: 105 leader length: 228 |
| 342 | AGI number: AT1G21560.1 uORF ′5 STOP: 12 uORF 3′ STOP: 105 leader length: 228 |
| 343 | AGI number: AT1G21560.3 uORF ′5 STOP: 68 uORF 3′ STOP: 161 leader length: 249 |
| 344 | AGI number: AT1G21560.3 uORF ′5 STOP: 68 uORF 3′ STOP: 161 leader length: 249 |
| 345 | AGI number: AT1G21780.1 uORF ′5 STOP: 134 uORF 3′ STOP: 242 leader length: 349 |
| 346 | AGI number: AT1G21780.1 uORF ′5 STOP: 134 uORF 3′ STOP: 242 leader length: 349 |
| 347 | AGI number: AT1G21780.2 uORF ′5 STOP: 281 uORF 3′ STOP: 389 leader length: 594 |
| 348 | AGI number: AT1G21780.2 uORF ′5 STOP: 281 uORF 3′ STOP: 389 leader length: 594 |
| 349 | AGI number: AT1G21840.1 uORF ′5 STOP: 179 uORF 3′ STOP: 239 leader length: 399 |
| 350 | AGI number: AT1G21840.1 uORF ′5 STOP: 179 uORF 3′ STOP: 239 leader length: 399 |
| 351 | AGI number: AT1G21840.1 uORF ′5 STOP: 150 uORF 3′ STOP: 249 leader length: 399 |
| 352 | AGI number: AT1G21840.1 uORF ′5 STOP: 150 uORF 3′ STOP: 249 leader length: 399 |
| 353 | AGI number: AT1G21930.1 uORF ′5 STOP: 78 uORF 3′ STOP: 366 leader length: 90 |
| 354 | AGI number: AT1G21930.1 uORF ′5 STOP: 78 uORF 3′ STOP: 366 leader length: 90 |
| 355 | AGI number: AT1G22050.1 uORF ′5 STOP: 110 uORF 3′ STOP: 161 leader length: 227 |
| 356 | AGI number: AT1G22050.1 uORF ′5 STOP: 110 uORF 3′ STOP: 161 leader length: 227 |
| 357 | AGI number: AT1G22180.3 uORF ′5 STOP: 575 uORF 3′ STOP: 626 leader length: 882 |
| 358 | AGI number: AT1G22180.3 uORF ′5 STOP: 575 uORF 3′ STOP: 626 leader length: 882 |
| 359 | AGI number: AT1G22190.1 uORF ′5 STOP: 212 uORF 3′ STOP: 275 leader length: 463 |
| 360 | AGI number: AT1G22190.1 uORF ′5 STOP: 212 uORF 3′ STOP: 275 leader length: 463 |
| 361 | AGI number: AT1G22520.2 uORF ′5 STOP: 74 uORF 3′ STOP: 365 leader length: 114 |
| 362 | AGI number: AT1G22520.2 uORF ′5 STOP: 74 uORF 3′ STOP: 365 leader length: 114 |
| 363 | AGI number: AT1G23150.1 uORF ′5 STOP: 216 uORF 3′ STOP: 315 leader length: 399 |
| 364 | AGI number: AT1G23150.1 uORF ′5 STOP: 216 uORF 3′ STOP: 315 leader length: 399 |
| 365 | AGI number: AT1G23150.1 uORF ′5 STOP: 163 uORF 3′ STOP: 322 leader length: 399 |
| 366 | AGI number: AT1G23150.1 uORF ′5 STOP: 163 uORF 3′ STOP: 322 leader length: 399 |
| 367 | AGI number: AT1G23360.3 uORF ′5 STOP: 194 uORF 3′ STOP: 293 leader length: 409 |
| 368 | AGI number: AT1G23360.3 uORF ′5 STOP: 194 uORF 3′ STOP: 293 leader length: 409 |
| 369 | AGI number: AT1G23480.3 uORF ′5 STOP: 179 uORF 3′ STOP: 260 leader length: 536 |
| 370 | AGI number: AT1G23480.3 uORF ′5 STOP: 179 uORF 3′ STOP: 260 leader length: 536 |
| 371 | AGI number: AT1G23730.1 uORF ′5 STOP: 26 uORF 3′ STOP: 122 leader length: 89 |
| 372 | AGI number: AT1G23730.1 uORF ′5 STOP: 26 uORF 3′ STOP: 122 leader length: 89 |
| 373 | AGI number: AT1G24030.2 uORF ′5 STOP: 132 uORF 3′ STOP: 405 leader length: 160 |
| 374 | AGI number: AT1G24030.2 uORF ′5 STOP: 132 uORF 3′ STOP: 405 leader length: 160 |
| 375 | AGI number: AT1G24510.2 uORF ′5 STOP: 257 uORF 3′ STOP: 311 leader length: 587 |
| 376 | AGI number: AT1G24510.2 uORF ′5 STOP: 257 uORF 3′ STOP: 311 leader length: 587 |
| 377 | AGI number: AT1G25054.2 uORF ′5 STOP: 14 uORF 3′ STOP: 125 leader length: 280 |
| 378 | AGI number: AT1G25054.2 uORF ′5 STOP: 14 uORF 3′ STOP: 125 leader length: 280 |
| 379 | AGI number: AT1G25054.2 uORF ′5 STOP: 231 uORF 3′ STOP: 285 leader length: 280 |
| 380 | AGI number: AT1G25054.2 uORF ′5 STOP: 231 uORF 3′ STOP: 285 leader length: 280 |
| 381 | AGI number: AT1G25054.2 uORF ′5 STOP: 91 uORF 3′ STOP: 268 leader length: 280 |
| 382 | AGI number: AT1G25054.2 uORF ′5 STOP: 91 uORF 3′ STOP: 268 leader length: 280 |
| 383 | AGI number: AT1G25280.1 uORF ′5 STOP: 261 uORF 3′ STOP: 336 leader length: 577 |
| 384 | AGI number: AT1G25280.1 uORF ′5 STOP: 261 uORF 3′ STOP: 336 leader length: 577 |
| 385 | AGI number: AT1G25280.1 uORF ′5 STOP: 145 uORF 3′ STOP: 313 leader length: 577 |
| 386 | AGI number: AT1G25280.1 uORF ′5 STOP: 145 uORF 3′ STOP: 313 leader length: 577 |
| 387 | AGI number: AT1G25280.2 uORF ′5 STOP: 119 uORF 3′ STOP: 194 leader length: 1048 |
| 388 | AGI number: AT1G25280.2 uORF ′5 STOP: 119 uORF 3′ STOP: 194 leader length: 1048 |
| 389 | AGI number: AT1G25280.2 uORF ′5 STOP: 3 uORF 3′ STOP: 171 leader length: 1048 |
| 390 | AGI number: AT1G25280.2 uORF ′5 STOP: 3 uORF 3′ STOP: 171 leader length: 1048 |
| 391 | AGI number: AT1G25280.3 uORF ′5 STOP: 80 uORF 3′ STOP: 248 leader length: 1129 |
| 392 | AGI number: AT1G25280.3 uORF ′5 STOP: 80 uORF 3′ STOP: 248 leader length: 1129 |
| 393 | AGI number: AT1G25280.3 uORF ′5 STOP: 196 uORF 3′ STOP: 271 leader length: 1129 |
| 394 | AGI number: AT1G25280.3 uORF ′5 STOP: 196 uORF 3′ STOP: 271 leader length: 1129 |
| 395 | AGI number: AT1G25420.2 uORF ′5 STOP: 214 uORF 3′ STOP: 379 leader length: 470 |
| 396 | AGI number: AT1G25420.2 uORF ′5 STOP: 214 uORF 3′ STOP: 379 leader length: 470 |
| 397 | AGI number: AT1G25420.3 uORF ′5 STOP: 159 uORF 3′ STOP: 243 leader length: 323 |
| 398 | AGI number: AT1G25420.3 uORF ′5 STOP: 159 uORF 3′ STOP: 243 leader length: 323 |
| 399 | AGI number: AT1G25470.1 uORF ′5 STOP: 296 uORF 3′ STOP: 374 leader length: 489 |
| 400 | AGI number: AT1G25470.1 uORF ′5 STOP: 296 uORF 3′ STOP: 374 leader length: 489 |
| 401 | AGI number: AT1G25470.2 uORF ′5 STOP: 290 uORF 3′ STOP: 368 leader length: 483 |
| 402 | AGI number: AT1G25470.2 uORF ′5 STOP: 290 uORF 3′ STOP: 368 leader length: 483 |
| 403 | AGI number: AT1G25500.1 uORF ′5 STOP: 46 uORF 3′ STOP: 112 leader length: 156 |
| 404 | AGI number: AT1G25500.1 uORF ′5 STOP: 46 uORF 3′ STOP: 112 leader length: 156 |
| 405 | AGI number: AT1G25500.3 uORF ′5 STOP: 221 uORF 3′ STOP: 305 leader length: 279 |
| 406 | AGI number: AT1G25500.3 uORF ′5 STOP: 221 uORF 3′ STOP: 305 leader length: 279 |
| 407 | AGI number: AT1G26150.1 uORF ′5 STOP: 332 uORF 3′ STOP: 416 leader length: 415 |
| 408 | AGI number: AT1G26150.1 uORF ′5 STOP: 332 uORF 3′ STOP: 416 leader length: 415 |
| 409 | AGI number: AT1G26150.1 uORF ′5 STOP: 250 uORF 3′ STOP: 442 leader length: 415 |
| 410 | AGI number: AT1G26150.1 uORF ′5 STOP: 250 uORF 3′ STOP: 442 leader length: 415 |
| 411 | AGI number: AT1G26230.2 uORF ′5 STOP: 153 uORF 3′ STOP: 387 leader length: 522 |
| 412 | AGI number: AT1G26230.2 uORF ′5 STOP: 153 uORF 3′ STOP: 387 leader length: 522 |
| 413 | AGI number: AT1G26230.2 uORF ′5 STOP: 178 uORF 3′ STOP: 265 leader length: 522 |
| 414 | AGI number: AT1G26230.2 uORF ′5 STOP: 178 uORF 3′ STOP: 265 leader length: 522 |
| 415 | AGI number: AT1G26230.2 uORF ′5 STOP: 137 uORF 3′ STOP: 269 leader length: 522 |
| 416 | AGI number: AT1G26230.2 uORF ′5 STOP: 137 uORF 3′ STOP: 269 leader length: 522 |
| 417 | AGI number: AT1G26440.2 uORF ′5 STOP: 101 uORF 3′ STOP: 155 leader length: 314 |
| 418 | AGI number: AT1G26440.2 uORF ′5 STOP: 101 uORF 3′ STOP: 155 leader length: 314 |
| 419 | AGI number: AT1G26520.1 uORF ′5 STOP: 27 uORF 3′ STOP: 219 leader length: 306 |
| 420 | AGI number: AT1G26520.1 uORF ′5 STOP: 27 uORF 3′ STOP: 219 leader length: 306 |
| 421 | AGI number: AT1G26530.1 uORF ′5 STOP: 97 uORF 3′ STOP: 262 leader length: 530 |
| 422 | AGI number: AT1G26530.1 uORF ′5 STOP: 97 uORF 3′ STOP: 262 leader length: 530 |
| 423 | AGI number: AT1G26530.1 uORF ′5 STOP: 494 uORF 3′ STOP: 647 leader length: 530 |
| 424 | AGI number: AT1G26530.1 uORF ′5 STOP: 494 uORF 3′ STOP: 647 leader length: 530 |
| 425 | AGI number: AT1G26660.2 uORF ′5 STOP: 123 uORF 3′ STOP: 186 leader length: 124 |
| 426 | AGI number: AT1G26660.2 uORF ′5 STOP: 123 uORF 3′ STOP: 186 leader length: 124 |
| 427 | AGI number: AT1G26850.1 uORF ′5 STOP: 20 uORF 3′ STOP: 134 leader length: 302 |
| 428 | AGI number: AT1G26850.1 uORF ′5 STOP: 20 uORF 3′ STOP: 134 leader length: 302 |
| 429 | AGI number: AT1G26850.1 uORF ′5 STOP: 34 uORF 3′ STOP: 112 leader length: 302 |
| 430 | AGI number: AT1G26850.1 uORF ′5 STOP: 34 uORF 3′ STOP: 112 leader length: 302 |
| 431 | AGI number: AT1G26850.2 uORF ′5 STOP: 223 uORF 3′ STOP: 301 leader length: 427 |
| 432 | AGI number: AT1G26850.2 uORF ′5 STOP: 223 uORF 3′ STOP: 301 leader length: 427 |
| 433 | AGI number: AT1G26850.2 uORF ′5 STOP: 209 uORF 3′ STOP: 323 leader length: 427 |
| 434 | AGI number: AT1G26850.2 uORF ′5 STOP: 209 uORF 3′ STOP: 323 leader length: 427 |
| 435 | AGI number: AT1G26850.3 uORF ′5 STOP: 14 uORF 3′ STOP: 128 leader length: 296 |
| 436 | AGI number: AT1G26850.3 uORF ′5 STOP: 14 uORF 3′ STOP: 128 leader length: 296 |
| 437 | AGI number: AT1G26850.3 uORF ′5 STOP: 28 uORF 3′ STOP: 106 leader length: 296 |
| 438 | AGI number: AT1G26850.3 uORF ′5 STOP: 28 uORF 3′ STOP: 106 leader length: 296 |
| 439 | AGI number: AT1G27460.1 uORF ′5 STOP: 138 uORF 3′ STOP: 222 leader length: 297 |
| 440 | AGI number: AT1G27460.1 uORF ′5 STOP: 138 uORF 3′ STOP: 222 leader length: 297 |
| 441 | AGI number: AT1G27460.1 uORF ′5 STOP: 101 uORF 3′ STOP: 203 leader length: 297 |
| 442 | AGI number: AT1G27460.1 uORF ′5 STOP: 101 uORF 3′ STOP: 203 leader length: 297 |
| 443 | AGI number: AT1G27760.1 uORF ′5 STOP: 163 uORF 3′ STOP: 217 leader length: 311 |
| 444 | AGI number: AT1G27760.1 uORF ′5 STOP: 163 uORF 3′ STOP: 217 leader length: 311 |
| 445 | AGI number: AT1G27760.1 uORF ′5 STOP: 29 uORF 3′ STOP: 242 leader length: 311 |
| 446 | AGI number: AT1G27760.1 uORF ′5 STOP: 29 uORF 3′ STOP: 242 leader length: 311 |
| 447 | AGI number: AT1G27760.2 uORF ′5 STOP: 70 uORF 3′ STOP: 238 leader length: 519 |
| 448 | AGI number: AT1G27760.2 uORF ′5 STOP: 70 uORF 3′ STOP: 238 leader length: 519 |
| 449 | AGI number: AT1G27760.2 uORF ′5 STOP: 12 uORF 3′ STOP: 225 leader length: 519 |
| 450 | AGI number: AT1G27760.2 uORF ′5 STOP: 12 uORF 3′ STOP: 225 leader length: 519 |
| 451 | AGI number: AT1G27760.3 uORF ′5 STOP: 29 uORF 3′ STOP: 242 leader length: 311 |
| 452 | AGI number: AT1G27760.3 uORF ′5 STOP: 29 uORF 3′ STOP: 242 leader length: 311 |
| 453 | AGI number: AT1G27760.3 uORF ′5 STOP: 87 uORF 3′ STOP: 255 leader length: 311 |
| 454 | AGI number: AT1G27760.3 uORF ′5 STOP: 87 uORF 3′ STOP: 255 leader length: 311 |
| 455 | AGI number: AT1G27840.2 uORF ′5 STOP: 70 uORF 3′ STOP: 268 leader length: 107 |
| 456 | AGI number: AT1G27840.2 uORF ′5 STOP: 70 uORF 3′ STOP: 268 leader length: 107 |
| 457 | AGI number: AT1G27840.3 uORF ′5 STOP: 70 uORF 3′ STOP: 268 leader length: 107 |
| 458 | AGI number: AT1G27840.3 uORF ′5 STOP: 70 uORF 3′ STOP: 268 leader length: 107 |
| 459 | AGI number: AT1G27850.1 uORF ′5 STOP: 288 uORF 3′ STOP: 354 leader length: 609 |
| 460 | AGI number: AT1G27850.1 uORF ′5 STOP: 288 uORF 3′ STOP: 354 leader length: 609 |
| 461 | AGI number: AT1G28090.2 uORF ′5 STOP: 72 uORF 3′ STOP: 156 leader length: 282 |
| 462 | AGI number: AT1G28090.2 uORF ′5 STOP: 72 uORF 3′ STOP: 156 leader length: 282 |
| 463 | AGI number: AT1G28090.2 uORF ′5 STOP: 52 uORF 3′ STOP: 226 leader length: 282 |
| 464 | AGI number: AT1G28090.2 uORF ′5 STOP: 52 uORF 3′ STOP: 226 leader length: 282 |
| 465 | AGI number: AT1G28090.2 uORF ′5 STOP: 153 uORF 3′ STOP: 216 leader length: 282 |
| 466 | AGI number: AT1G28090.2 uORF ′5 STOP: 153 uORF 3′ STOP: 216 leader length: 282 |
| 467 | AGI number: AT1G28135.1 uORF ′5 STOP: 2 uORF 3′ STOP: 128 leader length: 71 |
| 468 | AGI number: AT1G28135.1 uORF ′5 STOP: 2 uORF 3′ STOP: 128 leader length: 71 |
| 469 | AGI number: AT1G28260.1 uORF ′5 STOP: 219 uORF 3′ STOP: 294 leader length: 392 |
| 470 | AGI number: AT1G28260.1 uORF ′5 STOP: 219 uORF 3′ STOP: 294 leader length: 392 |
| 471 | AGI number: AT1G28260.1 uORF ′5 STOP: 265 uORF 3′ STOP: 316 leader length: 392 |
| 472 | AGI number: AT1G28260.1 uORF ′5 STOP: 265 uORF 3′ STOP: 316 leader length: 392 |
| 473 | AGI number: AT1G28260.1 uORF ′5 STOP: 242 uORF 3′ STOP: 305 leader length: 392 |
| 474 | AGI number: AT1G28260.1 uORF ′5 STOP: 242 uORF 3′ STOP: 305 leader length: 392 |
| 475 | AGI number: AT1G28560.1 uORF ′5 STOP: 41 uORF 3′ STOP: 119 leader length: 557 |
| 476 | AGI number: AT1G28560.1 uORF ′5 STOP: 41 uORF 3′ STOP: 119 leader length: 557 |
| 477 | AGI number: AT1G28580.2 uORF ′5 STOP: 125 uORF 3′ STOP: 359 leader length: 553 |
| 478 | AGI number: AT1G28580.2 uORF ′5 STOP: 125 uORF 3′ STOP: 359 leader length: 553 |
| 479 | AGI number: AT1G28580.2 uORF ′5 STOP: 219 uORF 3′ STOP: 312 leader length: 553 |
| 480 | AGI number: AT1G28580.2 uORF ′5 STOP: 219 uORF 3′ STOP: 312 leader length: 553 |
| 481 | AGI number: AT1G28710.2 uORF ′5 STOP: 11 uORF 3′ STOP: 89 leader length: 416 |
| 482 | AGI number: AT1G28710.2 uORF ′5 STOP: 11 uORF 3′ STOP: 89 leader length: 416 |
| 483 | AGI number: AT1G28710.3 uORF ′5 STOP: 106 uORF 3′ STOP: 184 leader length: 445 |
| 484 | AGI number: AT1G28710.3 uORF ′5 STOP: 106 uORF 3′ STOP: 184 leader length: 445 |
| 485 | AGI number: AT1G28710.3 uORF ′5 STOP: 441 uORF 3′ STOP: 609 leader length: 445 |
| 486 | AGI number: AT1G28710.3 uORF ′5 STOP: 441 uORF 3′ STOP: 609 leader length: 445 |
| 487 | AGI number: AT1G28710.3 uORF ′5 STOP: 89 uORF 3′ STOP: 215 leader length: 445 |
| 488 | AGI number: AT1G28710.3 uORF ′5 STOP: 89 uORF 3′ STOP: 215 leader length: 445 |
| 489 | AGI number: AT1G29120.1 uORF ′5 STOP: 71 uORF 3′ STOP: 125 leader length: 200 |
| 490 | AGI number: AT1G29120.1 uORF ′5 STOP: 71 uORF 3′ STOP: 125 leader length: 200 |
| 491 | AGI number: AT1G29120.1 uORF ′5 STOP: 22 uORF 3′ STOP: 106 leader length: 200 |
| 492 | AGI number: AT1G29120.1 uORF ′5 STOP: 22 uORF 3′ STOP: 106 leader length: 200 |
| 493 | AGI number: AT1G29120.2 uORF ′5 STOP: 110 uORF 3′ STOP: 164 leader length: 239 |
| 494 | AGI number: AT1G29120.2 uORF ′5 STOP: 110 uORF 3′ STOP: 164 leader length: 239 |
| 495 | AGI number: AT1G29120.2 uORF ′5 STOP: 61 uORF 3′ STOP: 145 leader length: 239 |
| 496 | AGI number: AT1G29120.2 uORF ′5 STOP: 61 uORF 3′ STOP: 145 leader length: 239 |
| 497 | AGI number: AT1G29120.4 uORF ′5 STOP: 21 uORF 3′ STOP: 105 leader length: 199 |
| 498 | AGI number: AT1G29120.4 uORF ′5 STOP: 21 uORF 3′ STOP: 105 leader length: 199 |
| 499 | AGI number: AT1G29120.4 uORF ′5 STOP: 70 uORF 3′ STOP: 124 leader length: 199 |
| 500 | AGI number: AT1G29120.4 uORF ′5 STOP: 70 uORF 3′ STOP: 124 leader length: 199 |
| 501 | AGI number: AT1G29120.5 uORF ′5 STOP: 165 uORF 3′ STOP: 219 leader length: 294 |
| 502 | AGI number: AT1G29120.5 uORF ′5 STOP: 165 uORF 3′ STOP: 219 leader length: 294 |
| 503 | AGI number: AT1G29120.5 uORF ′5 STOP: 116 uORF 3′ STOP: 200 leader length: 294 |
| 504 | AGI number: AT1G29120.5 uORF ′5 STOP: 116 uORF 3′ STOP: 200 leader length: 294 |
| 505 | AGI number: AT1G29390.2 uORF ′5 STOP: 294 uORF 3′ STOP: 345 leader length: 435 |
| 506 | AGI number: AT1G29390.2 uORF ′5 STOP: 294 uORF 3′ STOP: 345 leader length: 435 |
| 507 | AGI number: AT1G29390.2 uORF ′5 STOP: 182 uORF 3′ STOP: 332 leader length: 435 |
| 508 | AGI number: AT1G29390.2 uORF ′5 STOP: 182 uORF 3′ STOP: 332 leader length: 435 |
| 509 | AGI number: AT1G29465.1 uORF ′5 STOP: 189 uORF 3′ STOP: 252 leader length: 293 |
| 510 | AGI number: AT1G29465.1 uORF ′5 STOP: 189 uORF 3′ STOP: 252 leader length: 293 |
| 511 | AGI number: AT1G29465.1 uORF ′5 STOP: 211 uORF 3′ STOP: 274 leader length: 293 |
| 512 | AGI number: AT1G29465.1 uORF ′5 STOP: 211 uORF 3′ STOP: 274 leader length: 293 |
| 513 | AGI number: AT1G29465.1 uORF ′5 STOP: 164 uORF 3′ STOP: 239 leader length: 293 |
| 514 | AGI number: AT1G29465.1 uORF ′5 STOP: 164 uORF 3′ STOP: 239 leader length: 293 |
| 515 | AGI number: AT1G29890.1 uORF ′5 STOP: 315 uORF 3′ STOP: 384 leader length: 420 |
| 516 | AGI number: AT1G29890.1 uORF ′5 STOP: 315 uORF 3′ STOP: 384 leader length: 420 |
| 517 | AGI number: AT1G29890.1 uORF ′5 STOP: 89 uORF 3′ STOP: 398 leader length: 420 |
| 518 | AGI number: AT1G29890.1 uORF ′5 STOP: 89 uORF 3′ STOP: 398 leader length: 420 |
| 519 | AGI number: AT1G29890.1 uORF ′5 STOP: 301 uORF 3′ STOP: 361 leader length: 420 |
| 520 | AGI number: AT1G29890.1 uORF ′5 STOP: 301 uORF 3′ STOP: 361 leader length: 420 |
| 521 | AGI number: AT1G29950.1 uORF ′5 STOP: 179 uORF 3′ STOP: 296 leader length: 993 |
| 522 | AGI number: AT1G29950.1 uORF ′5 STOP: 179 uORF 3′ STOP: 296 leader length: 993 |
| 523 | AGI number: AT1G29950.1 uORF ′5 STOP: 73 uORF 3′ STOP: 277 leader length: 993 |
| 524 | AGI number: AT1G29950.1 uORF ′5 STOP: 73 uORF 3′ STOP: 277 leader length: 993 |
| 525 | AGI number: AT1G29950.1 uORF ′5 STOP: 718 uORF 3′ STOP: 826 leader length: 993 |
| 526 | AGI number: AT1G29950.1 uORF ′5 STOP: 718 uORF 3′ STOP: 826 leader length: 993 |
| 527 | AGI number: AT1G29950.1 uORF ′5 STOP: 552 uORF 3′ STOP: 633 leader length: 993 |
| 528 | AGI number: AT1G29950.1 uORF ′5 STOP: 552 uORF 3′ STOP: 633 leader length: 993 |
| 529 | AGI number: AT1G29950.1 uORF ′5 STOP: 479 uORF 3′ STOP: 638 leader length: 993 |
| 530 | AGI number: AT1G29950.1 uORF ′5 STOP: 479 uORF 3′ STOP: 638 leader length: 993 |
| 531 | AGI number: AT1G29950.2 uORF ′5 STOP: 590 uORF 3′ STOP: 749 leader length: 1104 |
| 532 | AGI number: AT1G29950.2 uORF ′5 STOP: 590 uORF 3′ STOP: 749 leader length: 1104 |
| 533 | AGI number: AT1G29950.2 uORF ′5 STOP: 829 uORF 3′ STOP: 937 leader length: 1104 |
| 534 | AGI number: AT1G29950.2 uORF ′5 STOP: 829 uORF 3′ STOP: 937 leader length: 1104 |
| 535 | AGI number: AT1G29950.2 uORF ′5 STOP: 242 uORF 3′ STOP: 521 leader length: 1104 |
| 536 | AGI number: AT1G29950.2 uORF ′5 STOP: 242 uORF 3′ STOP: 521 leader length: 1104 |
| 537 | AGI number: AT1G29950.2 uORF ′5 STOP: 663 uORF 3′ STOP: 744 leader length: 1104 |
| 538 | AGI number: AT1G29950.2 uORF ′5 STOP: 663 uORF 3′ STOP: 744 leader length: 1104 |
| 539 | AGI number: AT1G29951.1 uORF ′5 STOP: 242 uORF 3′ STOP: 506 leader length: 586 |
| 540 | AGI number: AT1G29951.1 uORF ′5 STOP: 242 uORF 3′ STOP: 506 leader length: 586 |
| 541 | AGI number: AT1G30210.1 uORF ′5 STOP: 139 uORF 3′ STOP: 238 leader length: 411 |
| 542 | AGI number: AT1G30210.1 uORF ′5 STOP: 139 uORF 3′ STOP: 238 leader length: 411 |
| 543 | AGI number: AT1G30270.1 uORF ′5 STOP: 222 uORF 3′ STOP: 363 leader length: 413 |
| 544 | AGI number: AT1G30270.1 uORF ′5 STOP: 222 uORF 3′ STOP: 363 leader length: 413 |
| 545 | AGI number: AT1G30270.1 uORF ′5 STOP: 271 uORF 3′ STOP: 355 leader length: 413 |
| 546 | AGI number: AT1G30270.1 uORF ′5 STOP: 271 uORF 3′ STOP: 355 leader length: 413 |
| 547 | AGI number: AT1G30330.2 uORF ′5 STOP: 554 uORF 3′ STOP: 638 leader length: 716 |
| 548 | AGI number: AT1G30330.2 uORF ′5 STOP: 554 uORF 3′ STOP: 638 leader length: 716 |
| 549 | AGI number: AT1G30650.1 uORF ′5 STOP: 28 uORF 3′ STOP: 163 leader length: 309 |
| 550 | AGI number: AT1G30650.1 uORF ′5 STOP: 28 uORF 3′ STOP: 163 leader length: 309 |
| 551 | AGI number: AT1G30820.1 uORF ′5 STOP: 98 uORF 3′ STOP: 242 leader length: 339 |
| 552 | AGI number: AT1G30820.1 uORF ′5 STOP: 98 uORF 3′ STOP: 242 leader length: 339 |
| 553 | AGI number: AT1G31300.2 uORF ′5 STOP: 154 uORF 3′ STOP: 268 leader length: 416 |
| 554 | AGI number: AT1G31300.2 uORF ′5 STOP: 154 uORF 3′ STOP: 268 leader length: 416 |
| 555 | AGI number: AT1G31460.1 uORF ′5 STOP: 238 uORF 3′ STOP: 397 leader length: 754 |
| 556 | AGI number: AT1G31460.1 uORF ′5 STOP: 238 uORF 3′ STOP: 397 leader length: 754 |
| 557 | AGI number: AT1G31460.1 uORF ′5 STOP: 245 uORF 3′ STOP: 377 leader length: 754 |
| 558 | AGI number: AT1G31460.1 uORF ′5 STOP: 245 uORF 3′ STOP: 377 leader length: 754 |
| 559 | AGI number: AT1G31600.3 uORF ′5 STOP: 331 uORF 3′ STOP: 415 leader length: 467 |
| 560 | AGI number: AT1G31600.3 uORF ′5 STOP: 331 uORF 3′ STOP: 415 leader length: 467 |
| 561 | AGI number: AT1G31880.1 uORF ′5 STOP: 113 uORF 3′ STOP: 260 leader length: 403 |
| 562 | AGI number: AT1G31880.1 uORF ′5 STOP: 113 uORF 3′ STOP: 260 leader length: 403 |
| 563 | AGI number: AT1G31910.1 uORF ′5 STOP: 25 uORF 3′ STOP: 79 leader length: 651 |
| 564 | AGI number: AT1G31910.1 uORF ′5 STOP: 25 uORF 3′ STOP: 79 leader length: 651 |
| 565 | AGI number: AT1G31910.1 uORF ′5 STOP: 45 uORF 3′ STOP: 369 leader length: 651 |
| 566 | AGI number: AT1G31910.1 uORF ′5 STOP: 45 uORF 3′ STOP: 369 leader length: 651 |
| 567 | AGI number: AT1G31910.2 uORF ′5 STOP: 24 uORF 3′ STOP: 78 leader length: 650 |
| 568 | AGI number: AT1G31910.2 uORF ′5 STOP: 24 uORF 3′ STOP: 78 leader length: 650 |
| 569 | AGI number: AT1G31910.2 uORF ′5 STOP: 44 uORF 3′ STOP: 368 leader length: 650 |
| 570 | AGI number: AT1G31910.2 uORF ′5 STOP: 44 uORF 3′ STOP: 368 leader length: 650 |
| 571 | AGI number: AT1G32230.1 uORF ′5 STOP: 241 uORF 3′ STOP: 385 leader length: 488 |
| 572 | AGI number: AT1G32230.1 uORF ′5 STOP: 241 uORF 3′ STOP: 385 leader length: 488 |
| 573 | AGI number: AT1G32230.2 uORF ′5 STOP: 241 uORF 3′ STOP: 385 leader length: 488 |
| 574 | AGI number: AT1G32230.2 uORF ′5 STOP: 241 uORF 3′ STOP: 385 leader length: 488 |
| 575 | AGI number: AT1G32230.3 uORF ′5 STOP: 241 uORF 3′ STOP: 385 leader length: 488 |
| 576 | AGI number: AT1G32230.3 uORF ′5 STOP: 241 uORF 3′ STOP: 385 leader length: 488 |
| 577 | AGI number: AT1G32540.1 uORF ′5 STOP: 122 uORF 3′ STOP: 266 leader length: 749 |
| 578 | AGI number: AT1G32540.1 uORF ′5 STOP: 122 uORF 3′ STOP: 266 leader length: 749 |
| 579 | AGI number: AT1G32540.1 uORF ′5 STOP: 369 uORF 3′ STOP: 435 leader length: 749 |
| 580 | AGI number: AT1G32540.1 uORF ′5 STOP: 369 uORF 3′ STOP: 435 leader length: 749 |
| 581 | AGI number: AT1G32540.1 uORF ′5 STOP: 383 uORF 3′ STOP: 443 leader length: 749 |
| 582 | AGI number: AT1G32540.1 uORF ′5 STOP: 383 uORF 3′ STOP: 443 leader length: 749 |
| 583 | AGI number: AT1G32540.2 uORF ′5 STOP: 100 uORF 3′ STOP: 160 leader length: 256 |
| 584 | AGI number: AT1G32540.2 uORF ′5 STOP: 100 uORF 3′ STOP: 160 leader length: 256 |
| 585 | AGI number: AT1G32540.2 uORF ′5 STOP: 86 uORF 3′ STOP: 152 leader length: 256 |
| 586 | AGI number: AT1G32540.2 uORF ′5 STOP: 86 uORF 3′ STOP: 152 leader length: 256 |
| 587 | AGI number: AT1G32750.1 uORF ′5 STOP: 54 uORF 3′ STOP: 111 leader length: 292 |
| 588 | AGI number: AT1G32750.1 uORF ′5 STOP: 54 uORF 3′ STOP: 111 leader length: 292 |
| 589 | AGI number: AT1G32780.1 uORF ′5 STOP: 155 uORF 3′ STOP: 209 leader length: 331 |
| 590 | AGI number: AT1G32780.1 uORF ′5 STOP: 155 uORF 3′ STOP: 209 leader length: 331 |
| 591 | AGI number: AT1G34190.1 uORF ′5 STOP: 22 uORF 3′ STOP: 151 leader length: 278 |
| 592 | AGI number: AT1G34190.1 uORF ′5 STOP: 22 uORF 3′ STOP: 151 leader length: 278 |
| 593 | AGI number: AT1G35340.2 uORF ′5 STOP: 6 uORF 3′ STOP: 219 leader length: 366 |
| 594 | AGI number: AT1G35340.2 uORF ′5 STOP: 6 uORF 3′ STOP: 219 leader length: 366 |
| 595 | AGI number: AT1G35340.2 uORF ′5 STOP: 65 uORF 3′ STOP: 224 leader length: 366 |
| 596 | AGI number: AT1G35340.2 uORF ′5 STOP: 65 uORF 3′ STOP: 224 leader length: 366 |
| 597 | AGI number: AT1G43690.1 uORF ′5 STOP: 36 uORF 3′ STOP: 165 leader length: 272 |
| 598 | AGI number: AT1G43690.1 uORF ′5 STOP: 36 uORF 3′ STOP: 165 leader length: 272 |
| 599 | AGI number: AT1G44750.1 uORF ′5 STOP: 46 uORF 3′ STOP: 97 leader length: 49 |
| 600 | AGI number: AT1G44750.1 uORF ′5 STOP: 46 uORF 3′ STOP: 97 leader length: 49 |
| 601 | AGI number: AT1G44750.3 uORF ′5 STOP: 174 uORF 3′ STOP: 270 leader length: 534 |
| 602 | AGI number: AT1G44750.3 uORF ′5 STOP: 174 uORF 3′ STOP: 270 leader length: 534 |
| 603 | AGI number: AT1G44750.3 uORF ′5 STOP: 206 uORF 3′ STOP: 260 leader length: 534 |
| 604 | AGI number: AT1G44750.3 uORF ′5 STOP: 206 uORF 3′ STOP: 260 leader length: 534 |
| 605 | AGI number: AT1G44890.1 uORF ′5 STOP: 38 uORF 3′ STOP: 290 leader length: 129 |
| 606 | AGI number: AT1G44890.1 uORF ′5 STOP: 38 uORF 3′ STOP: 290 leader length: 129 |
| 607 | AGI number: AT1G47740.1 uORF ′5 STOP: 205 uORF 3′ STOP: 283 leader length: 301 |
| 608 | AGI number: AT1G47740.1 uORF ′5 STOP: 205 uORF 3′ STOP: 283 leader length: 301 |
| 609 | AGI number: AT1G47740.1 uORF ′5 STOP: 168 uORF 3′ STOP: 309 leader length: 301 |
| 610 | AGI number: AT1G47740.1 uORF ′5 STOP: 168 uORF 3′ STOP: 309 leader length: 301 |
| 611 | AGI number: AT1G48140.2 uORF ′5 STOP: 124 uORF 3′ STOP: 394 leader length: 133 |
| 612 | AGI number: AT1G48140.2 uORF ′5 STOP: 124 uORF 3′ STOP: 394 leader length: 133 |
| 613 | AGI number: AT1G48330.1 uORF ′5 STOP: 29 uORF 3′ STOP: 293 leader length: 60 |
| 614 | AGI number: AT1G48330.1 uORF ′5 STOP: 29 uORF 3′ STOP: 293 leader length: 60 |
| 615 | AGI number: AT1G48635.1 uORF ′5 STOP: 9 uORF 3′ STOP: 96 leader length: 247 |
| 616 | AGI number: AT1G48635.1 uORF ′5 STOP: 9 uORF 3′ STOP: 96 leader length: 247 |
| 617 | AGI number: AT1G49000.1 uORF ′5 STOP: 90 uORF 3′ STOP: 189 leader length: 136 |
| 618 | AGI number: AT1G49000.1 uORF ′5 STOP: 90 uORF 3′ STOP: 189 leader length: 136 |
| 619 | AGI number: AT1G49130.2 uORF ′5 STOP: 25 uORF 3′ STOP: 91 leader length: 211 |
| 620 | AGI number: AT1G49130.2 uORF ′5 STOP: 25 uORF 3′ STOP: 91 leader length: 211 |
| 621 | AGI number: AT1G50360.1 uORF ′5 STOP: 22 uORF 3′ STOP: 211 leader length: 417 |
| 622 | AGI number: AT1G50360.1 uORF ′5 STOP: 22 uORF 3′ STOP: 211 leader length: 417 |
| 623 | AGI number: AT1G50440.2 uORF ′5 STOP: 68 uORF 3′ STOP: 161 leader length: 288 |
| 624 | AGI number: AT1G50440.2 uORF ′5 STOP: 68 uORF 3′ STOP: 161 leader length: 288 |
| 625 | AGI number: AT1G50440.2 uORF ′5 STOP: 43 uORF 3′ STOP: 151 leader length: 288 |
| 626 | AGI number: AT1G50440.2 uORF ′5 STOP: 43 uORF 3′ STOP: 151 leader length: 288 |
| 627 | AGI number: AT1G50460.1 uORF ′5 STOP: 201 uORF 3′ STOP: 291 leader length: 347 |
| 628 | AGI number: AT1G50460.1 uORF ′5 STOP: 201 uORF 3′ STOP: 291 leader length: 347 |
| 629 | AGI number: AT1G51745.2 uORF ′5 STOP: 94 uORF 3′ STOP: 160 leader length: 570 |
| 630 | AGI number: AT1G51745.2 uORF ′5 STOP: 94 uORF 3′ STOP: 160 leader length: 570 |
| 631 | AGI number: AT1G52080.1 uORF ′5 STOP: 209 uORF 3′ STOP: 341 leader length: 394 |
| 632 | AGI number: AT1G52080.1 uORF ′5 STOP: 209 uORF 3′ STOP: 341 leader length: 394 |
| 633 | AGI number: AT1G52100.2 uORF ′5 STOP: 223 uORF 3′ STOP: 277 leader length: 387 |
| 634 | AGI number: AT1G52100.2 uORF ′5 STOP: 223 uORF 3′ STOP: 277 leader length: 387 |
| 635 | AGI number: AT1G52150.1 uORF ′5 STOP: 82 uORF 3′ STOP: 193 leader length: 717 |
| 636 | AGI number: AT1G52150.1 uORF ′5 STOP: 82 uORF 3′ STOP: 193 leader length: 717 |
| 637 | AGI number: AT1G52150.2 uORF ′5 STOP: 82 uORF 3′ STOP: 193 leader length: 717 |
| 638 | AGI number: AT1G52150.2 uORF ′5 STOP: 82 uORF 3′ STOP: 193 leader length: 717 |
| 639 | AGI number: AT1G52370.3 uORF ′5 STOP: 108 uORF 3′ STOP: 201 leader length: 564 |
| 640 | AGI number: AT1G52370.3 uORF ′5 STOP: 108 uORF 3′ STOP: 201 leader length: 564 |
| 641 | AGI number: AT1G52630.2 uORF ′5 STOP: 248 uORF 3′ STOP: 407 leader length: 411 |
| 642 | AGI number: AT1G52630.2 uORF ′5 STOP: 248 uORF 3′ STOP: 407 leader length: 411 |
| 643 | AGI number: AT1G53035.1 uORF ′5 STOP: 25 uORF 3′ STOP: 103 leader length: 233 |
| 644 | AGI number: AT1G53035.1 uORF ′5 STOP: 25 uORF 3′ STOP: 103 leader length: 233 |
| 645 | AGI number: AT1G53035.1 uORF ′5 STOP: 29 uORF 3′ STOP: 116 leader length: 233 |
| 646 | AGI number: AT1G53035.1 uORF ′5 STOP: 29 uORF 3′ STOP: 116 leader length: 233 |
| 647 | AGI number: AT1G53110.1 uORF ′5 STOP: 87 uORF 3′ STOP: 177 leader length: 245 |
| 648 | AGI number: AT1G53110.1 uORF ′5 STOP: 87 uORF 3′ STOP: 177 leader length: 245 |
| 649 | AGI number: AT1G53110.1 uORF ′5 STOP: 2 uORF 3′ STOP: 185 leader length: 245 |
| 650 | AGI number: AT1G53110.1 uORF ′5 STOP: 2 uORF 3′ STOP: 185 leader length: 245 |
| 651 | AGI number: AT1G53200.2 uORF ′5 STOP: 360 uORF 3′ STOP: 447 leader length: 634 |
| 652 | AGI number: AT1G53200.2 uORF ′5 STOP: 360 uORF 3′ STOP: 447 leader length: 634 |
| 653 | AGI number: AT1G53300.1 uORF ′5 STOP: 104 uORF 3′ STOP: 215 leader length: 304 |
| 654 | AGI number: AT1G53300.1 uORF ′5 STOP: 104 uORF 3′ STOP: 215 leader length: 304 |
| 655 | AGI number: AT1G53430.2 uORF ′5 STOP: 87 uORF 3′ STOP: 234 leader length: 720 |
| 656 | AGI number: AT1G53430.2 uORF ′5 STOP: 87 uORF 3′ STOP: 234 leader length: 720 |
| 657 | AGI number: AT1G53490.1 uORF ′5 STOP: 572 uORF 3′ STOP: 656 leader length: 1196 |
| 658 | AGI number: AT1G53490.1 uORF ′5 STOP: 572 uORF 3′ STOP: 656 leader length: 1196 |
| 659 | AGI number: AT1G53490.1 uORF ′5 STOP: 717 uORF 3′ STOP: 819 leader length: 1196 |
| 660 | AGI number: AT1G53490.1 uORF ′5 STOP: 717 uORF 3′ STOP: 819 leader length: 1196 |
| 661 | AGI number: AT1G53490.1 uORF ′5 STOP: 816 uORF 3′ STOP: 1017 leader length: 1196 |
| 662 | AGI number: AT1G53490.1 uORF ′5 STOP: 816 uORF 3′ STOP: 1017 leader length: 1196 |
| 663 | AGI number: AT1G53490.1 uORF ′5 STOP: 653 uORF 3′ STOP: 788 leader length: 1196 |
| 664 | AGI number: AT1G53490.1 uORF ′5 STOP: 653 uORF 3′ STOP: 788 leader length: 1196 |
| 665 | AGI number: AT1G53490.1 uORF ′5 STOP: 685 uORF 3′ STOP: 796 leader length: 1196 |
| 666 | AGI number: AT1G53490.1 uORF ′5 STOP: 685 uORF 3′ STOP: 796 leader length: 1196 |
| 667 | AGI number: AT1G53490.1 uORF ′5 STOP: 529 uORF 3′ STOP: 652 leader length: 1196 |
| 668 | AGI number: AT1G53490.1 uORF ′5 STOP: 529 uORF 3′ STOP: 652 leader length: 1196 |
| 669 | AGI number: AT1G53650.1 uORF ′5 STOP: 161 uORF 3′ STOP: 215 leader length: 323 |
| 670 | AGI number: AT1G53650.1 uORF ′5 STOP: 161 uORF 3′ STOP: 215 leader length: 323 |
| 671 | AGI number: AT1G53780.3 uORF ′5 STOP: 117 uORF 3′ STOP: 177 leader length: 462 |
| 672 | AGI number: AT1G53780.3 uORF ′5 STOP: 117 uORF 3′ STOP: 177 leader length: 462 |
| 673 | AGI number: AT1G54180.1 uORF ′5 STOP: 101 uORF 3′ STOP: 179 leader length: 270 |
| 674 | AGI number: AT1G54180.1 uORF ′5 STOP: 101 uORF 3′ STOP: 179 leader length: 270 |
| 675 | AGI number: AT1G54180.1 uORF ′5 STOP: 60 uORF 3′ STOP: 195 leader length: 270 |
| 676 | AGI number: AT1G54180.1 uORF ′5 STOP: 60 uORF 3′ STOP: 195 leader length: 270 |
| 677 | AGI number: AT1G54360.4 uORF ′5 STOP: 21 uORF 3′ STOP: 174 leader length: 296 |
| 678 | AGI number: AT1G54360.4 uORF ′5 STOP: 21 uORF 3′ STOP: 174 leader length: 296 |
| 679 | AGI number: AT1G54390.5 uORF ′5 STOP: 123 uORF 3′ STOP: 204 leader length: 232 |
| 680 | AGI number: AT1G54390.5 uORF ′5 STOP: 123 uORF 3′ STOP: 204 leader length: 232 |
| 681 | AGI number: AT1G54410.1 uORF ′5 STOP: 42 uORF 3′ STOP: 477 leader length: 166 |
| 682 | AGI number: AT1G54410.1 uORF ′5 STOP: 42 uORF 3′ STOP: 477 leader length: 166 |
| 683 | AGI number: AT1G55120.2 uORF ′5 STOP: 30 uORF 3′ STOP: 174 leader length: 229 |
| 684 | AGI number: AT1G55120.2 uORF ′5 STOP: 30 uORF 3′ STOP: 174 leader length: 229 |
| 685 | AGI number: AT1G55120.2 uORF ′5 STOP: 97 uORF 3′ STOP: 184 leader length: 229 |
| 686 | AGI number: AT1G55120.2 uORF ′5 STOP: 97 uORF 3′ STOP: 184 leader length: 229 |
| 687 | AGI number: AT1G55350.4 uORF ′5 STOP: 291 uORF 3′ STOP: 342 leader length: 327 |
| 688 | AGI number: AT1G55350.4 uORF ′5 STOP: 291 uORF 3′ STOP: 342 leader length: 327 |
| 689 | AGI number: AT1G55350.4 uORF ′5 STOP: 184 uORF 3′ STOP: 313 leader length: 327 |
| 690 | AGI number: AT1G55350.4 uORF ′5 STOP: 184 uORF 3′ STOP: 313 leader length: 327 |
| 691 | AGI number: AT1G55350.5 uORF ′5 STOP: 396 uORF 3′ STOP: 447 leader length: 432 |
| 692 | AGI number: AT1G55350.5 uORF ′5 STOP: 396 uORF 3′ STOP: 447 leader length: 432 |
| 693 | AGI number: AT1G55500.1 uORF ′5 STOP: 73 uORF 3′ STOP: 199 leader length: 551 |
| 694 | AGI number: AT1G55500.1 uORF ′5 STOP: 73 uORF 3′ STOP: 199 leader length: 551 |
| 695 | AGI number: AT1G55580.1 uORF ′5 STOP: 5 uORF 3′ STOP: 122 leader length: 95 |
| 696 | AGI number: AT1G55580.1 uORF ′5 STOP: 5 uORF 3′ STOP: 122 leader length: 95 |
| 697 | AGI number: AT1G55610.1 uORF ′5 STOP: 14 uORF 3′ STOP: 185 leader length: 424 |
| 698 | AGI number: AT1G55610.1 uORF ′5 STOP: 14 uORF 3′ STOP: 185 leader length: 424 |
| 699 | AGI number: AT1G55610.2 uORF ′5 STOP: 43 uORF 3′ STOP: 169 leader length: 532 |
| 700 | AGI number: AT1G55610.2 uORF ′5 STOP: 43 uORF 3′ STOP: 169 leader length: 532 |
| 701 | AGI number: AT1G55610.2 uORF ′5 STOP: 14 uORF 3′ STOP: 188 leader length: 532 |
| 702 | AGI number: AT1G55610.2 uORF ′5 STOP: 14 uORF 3′ STOP: 188 leader length: 532 |
| 703 | AGI number: AT1G55630.1 uORF ′5 STOP: 266 uORF 3′ STOP: 338 leader length: 314 |
| 704 | AGI number: AT1G55630.1 uORF ′5 STOP: 266 uORF 3′ STOP: 338 leader length: 314 |
| 705 | AGI number: AT1G55675.1 uORF ′5 STOP: 258 uORF 3′ STOP: 327 leader length: 444 |
| 706 | AGI number: AT1G55675.1 uORF ′5 STOP: 258 uORF 3′ STOP: 327 leader length: 444 |
| 707 | AGI number: AT1G55675.1 uORF ′5 STOP: 49 uORF 3′ STOP: 241 leader length: 444 |
| 708 | AGI number: AT1G55675.1 uORF ′5 STOP: 49 uORF 3′ STOP: 241 leader length: 444 |
| 709 | AGI number: AT1G55680.1 uORF ′5 STOP: 12 uORF 3′ STOP: 147 leader length: 226 |
| 710 | AGI number: AT1G55680.1 uORF ′5 STOP: 12 uORF 3′ STOP: 147 leader length: 226 |
| 711 | AGI number: AT1G55760.1 uORF ′5 STOP: 198 uORF 3′ STOP: 288 leader length: 547 |
| 712 | AGI number: AT1G55760.1 uORF ′5 STOP: 198 uORF 3′ STOP: 288 leader length: 547 |
| 713 | AGI number: AT1G56045.1 uORF ′5 STOP: 35 uORF 3′ STOP: 182 leader length: 62 |
| 714 | AGI number: AT1G56045.1 uORF ′5 STOP: 35 uORF 3′ STOP: 182 leader length: 62 |
| 715 | AGI number: AT1G57610.2 uORF ′5 STOP: 23 uORF 3′ STOP: 113 leader length: 198 |
| 716 | AGI number: AT1G57610.2 uORF ′5 STOP: 23 uORF 3′ STOP: 113 leader length: 198 |
| 717 | AGI number: AT1G57610.3 uORF ′5 STOP: 23 uORF 3′ STOP: 113 leader length: 198 |
| 718 | AGI number: AT1G57610.3 uORF ′5 STOP: 23 uORF 3′ STOP: 113 leader length: 198 |
| 719 | AGI number: AT1G57700.1 uORF ′5 STOP: 42 uORF 3′ STOP: 150 leader length: 368 |
| 720 | AGI number: AT1G57700.1 uORF ′5 STOP: 42 uORF 3′ STOP: 150 leader length: 368 |
| 721 | AGI number: AT1G58180.3 uORF ′5 STOP: 92 uORF 3′ STOP: 320 leader length: 449 |
| 722 | AGI number: AT1G58180.3 uORF ′5 STOP: 92 uORF 3′ STOP: 320 leader length: 449 |
| 723 | AGI number: AT1G58180.3 uORF ′5 STOP: 162 uORF 3′ STOP: 351 leader length: 449 |
| 724 | AGI number: AT1G58180.3 uORF ′5 STOP: 162 uORF 3′ STOP: 351 leader length: 449 |
| 725 | AGI number: AT1G58180.3 uORF ′5 STOP: 238 uORF 3′ STOP: 334 leader length: 449 |
| 726 | AGI number: AT1G58180.3 uORF ′5 STOP: 238 uORF 3′ STOP: 334 leader length: 449 |
| 727 | AGI number: AT1G58200.1 uORF ′5 STOP: 48 uORF 3′ STOP: 99 leader length: 297 |
| 728 | AGI number: AT1G58200.1 uORF ′5 STOP: 48 uORF 3′ STOP: 99 leader length: 297 |
| 729 | AGI number: AT1G58200.2 uORF ′5 STOP: 29 uORF 3′ STOP: 158 leader length: 343 |
| 730 | AGI number: AT1G58200.2 uORF ′5 STOP: 29 uORF 3′ STOP: 158 leader length: 343 |
| 731 | AGI number: AT1G58200.2 uORF ′5 STOP: 90 uORF 3′ STOP: 141 leader length: 343 |
| 732 | AGI number: AT1G58200.2 uORF ′5 STOP: 90 uORF 3′ STOP: 141 leader length: 343 |
| 733 | AGI number: AT1G58250.1 uORF ′5 STOP: 96 uORF 3′ STOP: 195 leader length: 248 |
| 734 | AGI number: AT1G58250.1 uORF ′5 STOP: 96 uORF 3′ STOP: 195 leader length: 248 |
| 735 | AGI number: AT1G58250.1 uORF ′5 STOP: 145 uORF 3′ STOP: 199 leader length: 248 |
| 736 | AGI number: AT1G58250.1 uORF ′5 STOP: 145 uORF 3′ STOP: 199 leader length: 248 |
| 737 | AGI number: AT1G58350.1 uORF ′5 STOP: 32 uORF 3′ STOP: 329 leader length: 446 |
| 738 | AGI number: AT1G58350.1 uORF ′5 STOP: 32 uORF 3′ STOP: 329 leader length: 446 |
| 739 | AGI number: AT1G58602.2 uORF ′5 STOP: 102 uORF 3′ STOP: 252 leader length: 509 |
| 740 | AGI number: AT1G58602.2 uORF ′5 STOP: 102 uORF 3′ STOP: 252 leader length: 509 |
| 741 | AGI number: AT1G60440.1 uORF ′5 STOP: 20 uORF 3′ STOP: 80 leader length: 173 |
| 742 | AGI number: AT1G60440.1 uORF ′5 STOP: 20 uORF 3′ STOP: 80 leader length: 173 |
| 743 | AGI number: AT1G60850.3 uORF ′5 STOP: 2 uORF 3′ STOP: 56 leader length: 157 |
| 744 | AGI number: AT1G60850.3 uORF ′5 STOP: 2 uORF 3′ STOP: 56 leader length: 157 |
| 745 | AGI number: AT1G60890.1 uORF ′5 STOP: 58 uORF 3′ STOP: 115 leader length: 526 |
| 746 | AGI number: AT1G60890.1 uORF ′5 STOP: 58 uORF 3′ STOP: 115 leader length: 526 |
| 747 | AGI number: AT1G60890.2 uORF ′5 STOP: 58 uORF 3′ STOP: 115 leader length: 366 |
| 748 | AGI number: AT1G60890.2 uORF ′5 STOP: 58 uORF 3′ STOP: 115 leader length: 366 |
| 749 | AGI number: AT1G61150.3 uORF ′5 STOP: 246 uORF 3′ STOP: 318 leader length: 339 |
| 750 | AGI number: AT1G61150.3 uORF ′5 STOP: 246 uORF 3′ STOP: 318 leader length: 339 |
| 751 | AGI number: AT1G61150.7 uORF ′5 STOP: 181 uORF 3′ STOP: 253 leader length: 274 |
| 752 | AGI number: AT1G61150.7 uORF ′5 STOP: 181 uORF 3′ STOP: 253 leader length: 274 |
| 753 | AGI number: AT1G61410.1 uORF ′5 STOP: 231 uORF 3′ STOP: 414 leader length: 397 |
| 754 | AGI number: AT1G61410.1 uORF ′5 STOP: 231 uORF 3′ STOP: 414 leader length: 397 |
| 755 | AGI number: AT1G61520.2 uORF ′5 STOP: 289 uORF 3′ STOP: 379 leader length: 420 |
| 756 | AGI number: AT1G61520.2 uORF ′5 STOP: 289 uORF 3′ STOP: 379 leader length: 420 |
| 757 | AGI number: AT1G61520.2 uORF ′5 STOP: 133 uORF 3′ STOP: 199 leader length: 420 |
| 758 | AGI number: AT1G61520.2 uORF ′5 STOP: 133 uORF 3′ STOP: 199 leader length: 420 |
| 759 | AGI number: AT1G61820.3 uORF ′5 STOP: 206 uORF 3′ STOP: 257 leader length: 329 |
| 760 | AGI number: AT1G61820.3 uORF ′5 STOP: 206 uORF 3′ STOP: 257 leader length: 329 |
| 761 | AGI number: AT1G62305.1 uORF ′5 STOP: 111 uORF 3′ STOP: 267 leader length: 150 |
| 762 | AGI number: AT1G62305.1 uORF ′5 STOP: 111 uORF 3′ STOP: 267 leader length: 150 |
| 763 | AGI number: AT1G62540.1 uORF ′5 STOP: 63 uORF 3′ STOP: 120 leader length: 76 |
| 764 | AGI number: AT1G62540.1 uORF ′5 STOP: 63 uORF 3′ STOP: 120 leader length: 76 |
| 765 | AGI number: AT1G62610.1 uORF ′5 STOP: 225 uORF 3′ STOP: 333 leader length: 537 |
| 766 | AGI number: AT1G62610.1 uORF ′5 STOP: 225 uORF 3′ STOP: 333 leader length: 537 |
| 767 | AGI number: AT1G62610.2 uORF ′5 STOP: 399 uORF 3′ STOP: 453 leader length: 537 |
| 768 | AGI number: AT1G62610.2 uORF ′5 STOP: 399 uORF 3′ STOP: 453 leader length: 537 |
| 769 | AGI number: AT1G62610.3 uORF ′5 STOP: 225 uORF 3′ STOP: 333 leader length: 537 |
| 770 | AGI number: AT1G62610.3 uORF ′5 STOP: 225 uORF 3′ STOP: 333 leader length: 537 |
| 771 | AGI number: AT1G62840.1 uORF ′5 STOP: 38 uORF 3′ STOP: 122 leader length: 65 |
| 772 | AGI number: AT1G62840.1 uORF ′5 STOP: 38 uORF 3′ STOP: 122 leader length: 65 |
| 773 | AGI number: AT1G63010.3 uORF ′5 STOP: 208 uORF 3′ STOP: 274 leader length: 445 |
| 774 | AGI number: AT1G63010.3 uORF ′5 STOP: 208 uORF 3′ STOP: 274 leader length: 445 |
| 775 | AGI number: AT1G63010.4 uORF ′5 STOP: 94 uORF 3′ STOP: 163 leader length: 345 |
| 776 | AGI number: AT1G63010.4 uORF ′5 STOP: 94 uORF 3′ STOP: 163 leader length: 345 |
| 777 | AGI number: AT1G63010.4 uORF ′5 STOP: 54 uORF 3′ STOP: 174 leader length: 345 |
| 778 | AGI number: AT1G63010.4 uORF ′5 STOP: 54 uORF 3′ STOP: 174 leader length: 345 |
| 779 | AGI number: AT1G63010.5 uORF ′5 STOP: 105 uORF 3′ STOP: 225 leader length: 396 |
| 780 | AGI number: AT1G63010.5 uORF ′5 STOP: 105 uORF 3′ STOP: 225 leader length: 396 |
| 781 | AGI number: AT1G63010.5 uORF ′5 STOP: 145 uORF 3′ STOP: 214 leader length: 396 |
| 782 | AGI number: AT1G63010.5 uORF ′5 STOP: 145 uORF 3′ STOP: 214 leader length: 396 |
| 783 | AGI number: AT1G63480.1 uORF ′5 STOP: 282 uORF 3′ STOP: 342 leader length: 452 |
| 784 | AGI number: AT1G63480.1 uORF ′5 STOP: 282 uORF 3′ STOP: 342 leader length: 452 |
| 785 | AGI number: AT1G63670.3 uORF ′5 STOP: 36 uORF 3′ STOP: 111 leader length: 246 |
| 786 | AGI number: AT1G63670.3 uORF ′5 STOP: 36 uORF 3′ STOP: 111 leader length: 246 |
| 787 | AGI number: AT1G64110.1 uORF ′5 STOP: 33 uORF 3′ STOP: 93 leader length: 225 |
| 788 | AGI number: AT1G64110.1 uORF ′5 STOP: 33 uORF 3′ STOP: 93 leader length: 225 |
| 789 | AGI number: AT1G64110.1 uORF ′5 STOP: 22 uORF 3′ STOP: 97 leader length: 225 |
| 790 | AGI number: AT1G64110.1 uORF ′5 STOP: 22 uORF 3′ STOP: 97 leader length: 225 |
| 791 | AGI number: AT1G64110.2 uORF ′5 STOP: 27 uORF 3′ STOP: 102 leader length: 228 |
| 792 | AGI number: AT1G64110.2 uORF ′5 STOP: 27 uORF 3′ STOP: 102 leader length: 228 |
| 793 | AGI number: AT1G64140.1 uORF ′5 STOP: 283 uORF 3′ STOP: 412 leader length: 526 |
| 794 | AGI number: AT1G64140.1 uORF ′5 STOP: 283 uORF 3′ STOP: 412 leader length: 526 |
| 795 | AGI number: AT1G64230.4 uORF ′5 STOP: 106 uORF 3′ STOP: 208 leader length: 130 |
| 796 | AGI number: AT1G64230.4 uORF ′5 STOP: 106 uORF 3′ STOP: 208 leader length: 130 |
| 797 | AGI number: AT1G64230.5 uORF ′5 STOP: 118 uORF 3′ STOP: 241 leader length: 163 |
| 798 | AGI number: AT1G64230.5 uORF ′5 STOP: 118 uORF 3′ STOP: 241 leader length: 163 |
| 799 | AGI number: AT1G64630.1 uORF ′5 STOP: 132 uORF 3′ STOP: 351 leader length: 430 |
| 800 | AGI number: AT1G64630.1 uORF ′5 STOP: 132 uORF 3′ STOP: 351 leader length: 430 |
| 801 | AGI number: AT1G64990.2 uORF ′5 STOP: 41 uORF 3′ STOP: 134 leader length: 220 |
| 802 | AGI number: AT1G64990.2 uORF ′5 STOP: 41 uORF 3′ STOP: 134 leader length: 220 |
| 803 | AGI number: AT1G64990.2 uORF ′5 STOP: 51 uORF 3′ STOP: 141 leader length: 220 |
| 804 | AGI number: AT1G64990.2 uORF ′5 STOP: 51 uORF 3′ STOP: 141 leader length: 220 |
| 805 | AGI number: AT1G65070.2 uORF ′5 STOP: 48 uORF 3′ STOP: 351 leader length: 66 |
| 806 | AGI number: AT1G65070.2 uORF ′5 STOP: 48 uORF 3′ STOP: 351 leader length: 66 |
| 807 | AGI number: AT1G65840.1 uORF ′5 STOP: 65 uORF 3′ STOP: 269 leader length: 393 |
| 808 | AGI number: AT1G65840.1 uORF ′5 STOP: 65 uORF 3′ STOP: 269 leader length: 393 |
| 809 | AGI number: AT1G66660.1 uORF ′5 STOP: 306 uORF 3′ STOP: 369 leader length: 340 |
| 810 | AGI number: AT1G66660.1 uORF ′5 STOP: 306 uORF 3′ STOP: 369 leader length: 340 |
| 811 | AGI number: AT1G67325.2 uORF ′5 STOP: 196 uORF 3′ STOP: 286 leader length: 436 |
| 812 | AGI number: AT1G67325.2 uORF ′5 STOP: 196 uORF 3′ STOP: 286 leader length: 436 |
| 813 | AGI number: AT1G67480.1 uORF ′5 STOP: 211 uORF 3′ STOP: 448 leader length: 536 |
| 814 | AGI number: AT1G67480.1 uORF ′5 STOP: 211 uORF 3′ STOP: 448 leader length: 536 |
| 815 | AGI number: AT1G67480.2 uORF ′5 STOP: 94 uORF 3′ STOP: 331 leader length: 419 |
| 816 | AGI number: AT1G67480.2 uORF ′5 STOP: 94 uORF 3′ STOP: 331 leader length: 419 |
| 817 | AGI number: AT1G67570.1 uORF ′5 STOP: 88 uORF 3′ STOP: 160 leader length: 158 |
| 818 | AGI number: AT1G67570.1 uORF ′5 STOP: 88 uORF 3′ STOP: 160 leader length: 158 |
| 819 | AGI number: AT1G67800.1 uORF ′5 STOP: 249 uORF 3′ STOP: 600 leader length: 304 |
| 820 | AGI number: AT1G67800.1 uORF ′5 STOP: 249 uORF 3′ STOP: 600 leader length: 304 |
| 821 | AGI number: AT1G67900.1 uORF ′5 STOP: 135 uORF 3′ STOP: 192 leader length: 426 |
| 822 | AGI number: AT1G67900.1 uORF ′5 STOP: 135 uORF 3′ STOP: 192 leader length: 426 |
| 823 | AGI number: AT1G68130.2 uORF ′5 STOP: 353 uORF 3′ STOP: 425 leader length: 599 |
| 824 | AGI number: AT1G68130.2 uORF ′5 STOP: 353 uORF 3′ STOP: 425 leader length: 599 |
| 825 | AGI number: AT1G68160.1 uORF ′5 STOP: 126 uORF 3′ STOP: 180 leader length: 269 |
| 826 | AGI number: AT1G68160.1 uORF ′5 STOP: 126 uORF 3′ STOP: 180 leader length: 269 |
| 827 | AGI number: AT1G68410.2 uORF ′5 STOP: 101 uORF 3′ STOP: 209 leader length: 675 |
| 828 | AGI number: AT1G68410.2 uORF ′5 STOP: 101 uORF 3′ STOP: 209 leader length: 675 |
| 829 | AGI number: AT1G68550.1 uORF ′5 STOP: 136 uORF 3′ STOP: 406 leader length: 500 |
| 830 | AGI number: AT1G68550.1 uORF ′5 STOP: 136 uORF 3′ STOP: 406 leader length: 500 |
| 831 | AGI number: AT1G68550.2 uORF ′5 STOP: 146 uORF 3′ STOP: 416 leader length: 510 |
| 832 | AGI number: AT1G68550.2 uORF ′5 STOP: 146 uORF 3′ STOP: 416 leader length: 510 |
| 833 | AGI number: AT1G68920.1 uORF ′5 STOP: 9 uORF 3′ STOP: 90 leader length: 608 |
| 834 | AGI number: AT1G68920.1 uORF ′5 STOP: 9 uORF 3′ STOP: 90 leader length: 608 |
| 835 | AGI number: AT1G68920.3 uORF ′5 STOP: 14 uORF 3′ STOP: 95 leader length: 613 |
| 836 | AGI number: AT1G68920.3 uORF ′5 STOP: 14 uORF 3′ STOP: 95 leader length: 613 |
| 837 | AGI number: AT1G69170.1 uORF ′5 STOP: 72 uORF 3′ STOP: 273 leader length: 389 |
| 838 | AGI number: AT1G69170.1 uORF ′5 STOP: 72 uORF 3′ STOP: 273 leader length: 389 |
| 839 | AGI number: AT1G69690.1 uORF ′5 STOP: 75 uORF 3′ STOP: 153 leader length: 225 |
| 840 | AGI number: AT1G69690.1 uORF ′5 STOP: 75 uORF 3′ STOP: 153 leader length: 225 |
| 841 | AGI number: AT1G69750.1 uORF ′5 STOP: 16 uORF 3′ STOP: 109 leader length: 646 |
| 842 | AGI number: AT1G69750.1 uORF ′5 STOP: 16 uORF 3′ STOP: 109 leader length: 646 |
| 843 | AGI number: AT1G69750.1 uORF ′5 STOP: 178 uORF 3′ STOP: 334 leader length: 646 |
| 844 | AGI number: AT1G69750.1 uORF ′5 STOP: 178 uORF 3′ STOP: 334 leader length: 646 |
| 845 | AGI number: AT1G69750.1 uORF ′5 STOP: 23 uORF 3′ STOP: 98 leader length: 646 |
| 846 | AGI number: AT1G69750.1 uORF ′5 STOP: 23 uORF 3′ STOP: 98 leader length: 646 |
| 847 | AGI number: AT1G69840.3 uORF ′5 STOP: 276 uORF 3′ STOP: 342 leader length: 430 |
| 848 | AGI number: AT1G69840.3 uORF ′5 STOP: 276 uORF 3′ STOP: 342 leader length: 430 |
| 849 | AGI number: AT1G69870.1 uORF ′5 STOP: 21 uORF 3′ STOP: 108 leader length: 181 |
| 850 | AGI number: AT1G69870.1 uORF ′5 STOP: 21 uORF 3′ STOP: 108 leader length: 181 |
| 851 | AGI number: AT1G70160.1 uORF ′5 STOP: 28 uORF 3′ STOP: 136 leader length: 210 |
| 852 | AGI number: AT1G70160.1 uORF ′5 STOP: 28 uORF 3′ STOP: 136 leader length: 210 |
| 853 | AGI number: AT1G70280.1 uORF ′5 STOP: 255 uORF 3′ STOP: 363 leader length: 506 |
| 854 | AGI number: AT1G70280.1 uORF ′5 STOP: 255 uORF 3′ STOP: 363 leader length: 506 |
| 855 | AGI number: AT1G70280.1 uORF ′5 STOP: 328 uORF 3′ STOP: 427 leader length: 506 |
| 856 | AGI number: AT1G70280.1 uORF ′5 STOP: 328 uORF 3′ STOP: 427 leader length: 506 |
| 857 | AGI number: AT1G70340.1 uORF ′5 STOP: 24 uORF 3′ STOP: 108 leader length: 224 |
| 858 | AGI number: AT1G70340.1 uORF ′5 STOP: 24 uORF 3′ STOP: 108 leader length: 224 |
| 859 | AGI number: AT1G70340.1 uORF ′5 STOP: 34 uORF 3′ STOP: 127 leader length: 224 |
| 860 | AGI number: AT1G70340.1 uORF ′5 STOP: 34 uORF 3′ STOP: 127 leader length: 224 |
| 861 | AGI number: AT1G70670.1 uORF ′5 STOP: 35 uORF 3′ STOP: 134 leader length: 248 |
| 862 | AGI number: AT1G70670.1 uORF ′5 STOP: 35 uORF 3′ STOP: 134 leader length: 248 |
| 863 | AGI number: AT1G70780.1 uORF ′5 STOP: 134 uORF 3′ STOP: 338 leader length: 417 |
| 864 | AGI number: AT1G70780.1 uORF ′5 STOP: 134 uORF 3′ STOP: 338 leader length: 417 |
| 865 | AGI number: AT1G70780.1 uORF ′5 STOP: 145 uORF 3′ STOP: 301 leader length: 417 |
| 866 | AGI number: AT1G70780.1 uORF ′5 STOP: 145 uORF 3′ STOP: 301 leader length: 417 |
| 867 | AGI number: AT1G70782.1 uORF ′5 STOP: 134 uORF 3′ STOP: 338 leader length: 147 |
| 868 | AGI number: AT1G70782.1 uORF ′5 STOP: 134 uORF 3′ STOP: 338 leader length: 147 |
| 869 | AGI number: AT1G71020.2 uORF ′5 STOP: 289 uORF 3′ STOP: 343 leader length: 727 |
| 870 | AGI number: AT1G71020.2 uORF ′5 STOP: 289 uORF 3′ STOP: 343 leader length: 727 |
| 871 | AGI number: AT1G71340.1 uORF ′5 STOP: 787 uORF 3′ STOP: 889 leader length: 1017 |
| 872 | AGI number: AT1G71340.1 uORF ′5 STOP: 787 uORF 3′ STOP: 889 leader length: 1017 |
| 873 | AGI number: AT1G71340.1 uORF ′5 STOP: 779 uORF 3′ STOP: 857 leader length: 1017 |
| 874 | AGI number: AT1G71340.1 uORF ′5 STOP: 779 uORF 3′ STOP: 857 leader length: 1017 |
| 875 | AGI number: AT1G71696.1 uORF ′5 STOP: 74 uORF 3′ STOP: 383 leader length: 458 |
| 876 | AGI number: AT1G71696.1 uORF ′5 STOP: 74 uORF 3′ STOP: 383 leader length: 458 |
| 877 | AGI number: AT1G71940.1 uORF ′5 STOP: 88 uORF 3′ STOP: 148 lcader length: 250 |
| 878 | AGI number: AT1G71940.1 uORF ′5 STOP: 88 uORF 3′ STOP: 148 leader length: 250 |
| 879 | AGI number: AT1G71980.1 uORF ′5 STOP: 51 uORF 3′ STOP: 234 leader length: 347 |
| 880 | AGI number: AT1G71980.1 uORF ′5 STOP: 51 uORF 3′ STOP: 234 leader length: 347 |
| 881 | AGI number: AT1G72130.2 uORF ′5 STOP: 187 uORF 3′ STOP: 307 leader length: 444 |
| 882 | AGI number: AT1G72130.2 uORF ′5 STOP: 187 uORF 3′ STOP: 307 leader length: 444 |
| 883 | AGI number: AT1G72130.2 uORF ′5 STOP: 275 uORF 3′ STOP: 341 leader length: 444 |
| 884 | AGI number: AT1G72130.2 uORF ′5 STOP: 275 uORF 3′ STOP: 341 leader length: 444 |
| 885 | AGI number: AT1G72510.1 uORF ′5 STOP: 183 uORF 3′ STOP: 279 leader length: 436 |
| 886 | AGI number: AT1G72510.1 uORF ′5 STOP: 183 uORF 3′ STOP: 279 leader length: 436 |
| 887 | AGI number: AT1G72510.1 uORF ′5 STOP: 242 uORF 3′ STOP: 305 leader length: 436 |
| 888 | AGI number: AT1G72510.1 uORF ′5 STOP: 242 uORF 3′ STOP: 305 leader length: 436 |
| 889 | AGI number: AT1G72510.2 uORF ′5 STOP: 113 uORF 3′ STOP: 170 leader length: 241 |
| 890 | AGI number: AT1G72510.2 uORF ′5 STOP: 113 uORF 3′ STOP: 170 leader length: 241 |
| 891 | AGI number: AT1G72770.1 uORF ′5 STOP: 464 uORF 3′ STOP: 521 leader length: 585 |
| 892 | AGI number: AT1G72770.1 uORF ′5 STOP: 464 uORF 3′ STOP: 521 leader length: 585 |
| 893 | AGI number: AT1G72770.1 uORF ′5 STOP: 394 uORF 3′ STOP: 511 leader length: 585 |
| 894 | AGI number: AT1G72770.1 uORF ′5 STOP: 394 uORF 3′ STOP: 511 leader length: 585 |
| 895 | AGI number: AT1G72770.2 uORF ′5 STOP: 464 uORF 3′ STOP: 521 leader length: 585 |
| 896 | AGI number: AT1G72770.2 uORF ′5 STOP: 464 uORF 3′ STOP: 521 leader length: 585 |
| 897 | AGI number: AT1G72770.2 uORF ′5 STOP: 394 uORF 3′ STOP: 511 leader length: 585 |
| 898 | AGI number: AT1G72770.2 uORF ′5 STOP: 394 uORF 3′ STOP: 511 leader length: 585 |
| 899 | AGI number: AT1G72770.3 uORF ′5 STOP: 464 uORF 3′ STOP: 521 leader length: 585 |
| 900 | AGI number: AT1G72770.3 uORF ′5 STOP: 464 uORF 3′ STOP: 521 leader length: 585 |
| 901 | AGI number: AT1G72770.3 uORF ′5 STOP: 394 uORF 3′ STOP: 511 leader length: 585 |
| 902 | AGI number: AT1G72770.3 uORF ′5 STOP: 394 uORF 3′ STOP: 511 leader length: 585 |
| 903 | AGI number: AT1G72820.1 uORF ′5 STOP: 197 uORF 3′ STOP: 317 leader length: 579 |
| 904 | AGI number: AT1G72820.1 uORF ′5 STOP: 197 uORF 3′ STOP: 317 leader length: 579 |
| 905 | AGI number: AT1G72820.1 uORF ′5 STOP: 437 uORF 3′ STOP: 491 leader length: 579 |
| 906 | AGI number: AT1G72820.1 uORF ′5 STOP: 437 uORF 3′ STOP: 491 leader length: 579 |
| 907 | AGI number: AT1G72820.1 uORF ′5 STOP: 433 uORF 3′ STOP: 484 leader length: 579 |
| 908 | AGI number: AT1G72820.1 uORF ′5 STOP: 433 uORF 3′ STOP: 484 leader length: 579 |
| 909 | AGI number: AT1G72820.1 uORF ′5 STOP: 253 uORF 3′ STOP: 331 leader length: 579 |
| 910 | AGI number: AT1G72820.1 uORF ′5 STOP: 253 uORF 3′ STOP: 331 leader length: 579 |
| 911 | AGI number: AT1G72830.2 uORF ′5 STOP: 111 uORF 3′ STOP: 204 leader length: 425 |
| 912 | AGI number: AT1G72830.2 uORF ′5 STOP: 111 uORF 3′ STOP: 204 leader length: 425 |
| 913 | AGI number: AT1G72990.1 uORF ′5 STOP: 64 uORF 3′ STOP: 151 leader length: 221 |
| 914 | AGI number: AT1G72990.1 uORF ′5 STOP: 64 uORF 3′ STOP: 151 leader length: 221 |
| 915 | AGI number: AT1G73360.1 uORF ′5 STOP: 602 uORF 3′ STOP: 653 leader length: 701 |
| 916 | AGI number: AT1G73360.1 uORF ′5 STOP: 602 uORF 3′ STOP: 653 leader length: 701 |
| 917 | AGI number: AT1G73360.1 uORF ′5 STOP: 544 uORF 3′ STOP: 616 leader length: 701 |
| 918 | AGI number: AT1G73360.1 uORF ′5 STOP: 544 uORF 3′ STOP: 616 leader length: 701 |
| 919 | AGI number: AT1G73370.2 uORF ′5 STOP: 41 uORF 3′ STOP: 104 leader length: 248 |
| 920 | AGI number: AT1G73370.2 uORF ′5 STOP: 41 uORF 3′ STOP: 104 leader length: 248 |
| 921 | AGI number: AT1G73470.2 uORF ′5 STOP: 5 uORF 3′ STOP: 116 leader length: 480 |
| 922 | AGI number: AT1G73470.2 uORF ′5 STOP: 5 uORF 3′ STOP: 116 leader length: 480 |
| 923 | AGI number: AT1G73480.1 uORF ′5 STOP: 71 uORF 3′ STOP: 179 leader length: 327 |
| 924 | AGI number: AT1G73480.1 uORF ′5 STOP: 71 uORF 3′ STOP: 179 leader length: 327 |
| 925 | AGI number: AT1G74160.1 uORF ′5 STOP: 465 uORF 3′ STOP: 588 leader length: 738 |
| 926 | AGI number: AT1G74160.1 uORF ′5 STOP: 465 uORF 3′ STOP: 588 leader length: 738 |
| 927 | AGI number: AT1G74160.1 uORF ′5 STOP: 520 uORF 3′ STOP: 595 leader length: 738 |
| 928 | AGI number: AT1G74160.1 uORF ′5 STOP: 520 uORF 3′ STOP: 595 leader length: 738 |
| 929 | AGI number: AT1G74160.1 uORF ′5 STOP: 124 uORF 3′ STOP: 187 leader length: 738 |
| 930 | AGI number: AT1G74160.1 uORF ′5 STOP: 124 uORF 3′ STOP: 187 leader length: 738 |
| 931 | AGI number: AT1G74370.1 uORF ′5 STOP: 12 uORF 3′ STOP: 183 leader length: 225 |
| 932 | AGI number: AT1G74370.1 uORF ′5 STOP: 12 uORF 3′ STOP: 183 leader length: 225 |
| 933 | AGI number: AT1G74370.1 uORF ′5 STOP: 109 uORF 3′ STOP: 175 leader length: 225 |
| 934 | AGI number: AT1G74370.1 uORF ′5 STOP: 109 uORF 3′ STOP: 175 leader length: 225 |
| 935 | AGI number: AT1G74650.1 uORF ′5 STOP: 63 uORF 3′ STOP: 135 leader length: 302 |
| 936 | AGI number: AT1G74650.1 uORF ′5 STOP: 63 uORF 3′ STOP: 135 leader length: 302 |
| 937 | AGI number: AT1G74650.1 uORF ′5 STOP: 47 uORF 3′ STOP: 131 leader length: 302 |
| 938 | AGI number: AT1G74650.1 uORF ′5 STOP: 47 uORF 3′ STOP: 131 leader length: 302 |
| 939 | AGI number: AT1G74680.1 uORF ′5 STOP: 161 uORF 3′ STOP: 272 leader length: 340 |
| 940 | AGI number: AT1G74680.1 uORF ′5 STOP: 161 uORF 3′ STOP: 272 leader length: 340 |
| 941 | AGI number: AT1G74910.1 uORF ′5 STOP: 32 uORF 3′ STOP: 101 leader length: 312 |
| 942 | AGI number: AT1G74910.1 uORF ′5 STOP: 32 uORF 3′ STOP: 101 leader length: 312 |
| 943 | AGI number: AT1G75190.2 uORF ′5 STOP: 3 uORF 3′ STOP: 126 leader length: 216 |
| 944 | AGI number: AT1G75190.2 uORF ′5 STOP: 3 uORF 3′ STOP: 126 leader length: 216 |
| 945 | AGI number: AT1G75240.1 uORF ′5 STOP: 265 uORF 3′ STOP: 337 leader length: 427 |
| 946 | AGI number: AT1G75240.1 uORF ′5 STOP: 265 uORF 3′ STOP: 337 leader length: 427 |
| 947 | AGI number: AT1G75240.1 uORF ′5 STOP: 73 uORF 3′ STOP: 148 leader length: 427 |
| 948 | AGI number: AT1G75240.1 uORF ′5 STOP: 73 uORF 3′ STOP: 148 leader length: 427 |
| 949 | AGI number: AT1G75240.1 uORF ′5 STOP: 108 uORF 3′ STOP: 162 leader length: 427 |
| 950 | AGI number: AT1G75240.1 uORF ′5 STOP: 108 uORF 3′ STOP: 162 leader length: 427 |
| 951 | AGI number: AT1G75240.1 uORF ′5 STOP: 275 uORF 3′ STOP: 347 leader length: 427 |
| 952 | AGI number: AT1G75240.1 uORF ′5 STOP: 275 uORF 3′ STOP: 347 leader length: 427 |
| 953 | AGI number: AT1G75300.1 uORF ′5 STOP: 36 uORF 3′ STOP: 126 leader length: 57 |
| 954 | AGI number: AT1G75300.1 uORF ′5 STOP: 36 uORF 3′ STOP: 126 leader length: 57 |
| 955 | AGI number: AT1G75340.2 uORF ′5 STOP: 5 uORF 3′ STOP: 113 leader length: 92 |
| 956 | AGI number: AT1G75340.2 uORF ′5 STOP: 5 uORF 3′ STOP: 113 leader length: 92 |
| 957 | AGI number: AT1G75390.1 uORF ′5 STOP: 314 uORF 3′ STOP: 425 leader length: 526 |
| 958 | AGI number: AT1G75390.1 uORF ′5 STOP: 314 uORF 3′ STOP: 425 leader length: 526 |
| 959 | AGI number: AT1G75390.1 uORF ′5 STOP: 301 uORF 3′ STOP: 400 leader length: 526 |
| 960 | AGI number: AT1G75390.1 uORF ′5 STOP: 301 uORF 3′ STOP: 400 leader length: 526 |
| 961 | AGI number: AT1G75390.1 uORF ′5 STOP: 216 uORF 3′ STOP: 384 leader length: 526 |
| 962 | AGI number: AT1G75390.1 uORF ′5 STOP: 216 uORF 3′ STOP: 384 leader length: 526 |
| 963 | AGI number: AT1G75390.2 uORF ′5 STOP: 216 uORF 3′ STOP: 384 leader length: 526 |
| 964 | AGI number: AT1G75390.2 uORF ′5 STOP: 216 uORF 3′ STOP: 384 leader length: 526 |
| 965 | AGI number: AT1G75390.2 uORF ′5 STOP: 314 uORF 3′ STOP: 425 leader length: 526 |
| 966 | AGI number: AT1G75390.2 uORF ′5 STOP: 314 uORF 3′ STOP: 425 leader length: 526 |
| 967 | AGI number: AT1G75390.2 uORF ′5 STOP: 301 uORF 3′ STOP: 400 leader length: 526 |
| 968 | AGI number: AT1G75390.2 uORF ′5 STOP: 301 uORF 3′ STOP: 400 leader length: 526 |
| 969 | AGI number: AT1G75450.2 uORF ′5 STOP: 80 uORF 3′ STOP: 164 leader length: 323 |
| 970 | AGI number: AT1G75450.2 uORF ′5 STOP: 80 uORF 3′ STOP: 164 leader length: 323 |
| 971 | AGI number: AT1G75490.1 uORF ′5 STOP: 345 uORF 3′ STOP: 585 leader length: 543 |
| 972 | AGI number: AT1G75490.1 uORF ′5 STOP: 345 uORF 3′ STOP: 585 leader length: 543 |
| 973 | AGI number: AT1G75600.1 uORF ′5 STOP: 79 uORF 3′ STOP: 241 leader length: 88 |
| 974 | AGI number: AT1G75600.1 uORF ′5 STOP: 79 uORF 3′ STOP: 241 leader length: 88 |
| 975 | AGI number: AT1G75730.1 uORF ′5 STOP: 550 uORF 3′ STOP: 619 leader length: 684 |
| 976 | AGI number: AT1G75730.1 uORF ′5 STOP: 550 uORF 3′ STOP: 619 leader length: 684 |
| 977 | AGI number: AT1G76200.1 uORF ′5 STOP: 14 uORF 3′ STOP: 287 leader length: 101 |
| 978 | AGI number: AT1G76200.1 uORF ′5 STOP: 14 uORF 3′ STOP: 287 leader length: 101 |
| 979 | AGI number: AT1G76710.1 uORF ′5 STOP: 89 uORF 3′ STOP: 395 leader length: 114 |
| 980 | AGI number: AT1G76710.1 uORF ′5 STOP: 89 uORF 3′ STOP: 395 leader length: 114 |
| 981 | AGI number: AT1G76720.1 uORF ′5 STOP: 425 uORF 3′ STOP: 500 leader length: 580 |
| 982 | AGI number: AT1G76720.1 uORF ′5 STOP: 425 uORF 3′ STOP: 500 leader length: 580 |
| 983 | AGI number: AT1G77350.1 uORF ′5 STOP: 84 uORF 3′ STOP: 450 leader length: 90 |
| 984 | AGI number: AT1G77350.1 uORF ′5 STOP: 84 uORF 3′ STOP: 450 leader length: 90 |
| 985 | AGI number: AT1G77350.2 uORF ′5 STOP: 79 uORF 3′ STOP: 475 leader length: 115 |
| 986 | AGI number: AT1G77350.2 uORF ′5 STOP: 79 uORF 3′ STOP: 475 leader length: 115 |
| 987 | AGI number: AT1G77460.1 uORF ′5 STOP: 174 uORF 3′ STOP: 240 leader length: 332 |
| 988 | AGI number: AT1G77460.1 uORF ′5 STOP: 174 uORF 3′ STOP: 240 leader length: 332 |
| 989 | AGI number: AT1G77460.1 uORF ′5 STOP: 155 uORF 3′ STOP: 257 leader length: 332 |
| 990 | AGI number: AT1G77460.1 uORF ′5 STOP: 155 uORF 3′ STOP: 257 leader length: 332 |
| 991 | AGI number: AT1G77460.2 uORF ′5 STOP: 100 uORF 3′ STOP: 166 leader length: 258 |
| 992 | AGI number: AT1G77460.2 uORF ′5 STOP: 100 uORF 3′ STOP: 166 leader length: 258 |
| 993 | AGI number: AT1G77460.2 uORF ′5 STOP: 81 uORF 3′ STOP: 183 leader length: 258 |
| 994 | AGI number: AT1G77460.2 uORF ′5 STOP: 81 uORF 3′ STOP: 183 leader length: 258 |
| 995 | AGI number: AT1G77580.1 uORF ′5 STOP: 703 uORF 3′ STOP: 829 leader length: 898 |
| 996 | AGI number: AT1G77580.1 uORF ′5 STOP: 703 uORF 3′ STOP: 829 leader length: 898 |
| 997 | AGI number: AT1G77580.1 uORF ′5 STOP: 611 uORF 3′ STOP: 800 leader length: 898 |
| 998 | AGI number: AT1G77580.1 uORF ′5 STOP: 611 uORF 3′ STOP: 800 leader length: 898 |
| 999 | AGI number: AT1G77660.1 uORF ′5 STOP: 133 uORF 3′ STOP: 247 leader length: 325 |
| 1000 | AGI number: AT1G77660.1 uORF ′5 STOP: 133 uORF 3′ STOP: 247 leader length: 325 |
| 1001 | AGI number: AT1G77680.1 uORF ′5 STOP: 112 uORF 3′ STOP: 220 leader length: 324 |
| 1002 | AGI number: AT1G77680.1 uORF ′5 STOP: 112 uORF 3′ STOP: 220 leader length: 324 |
| 1003 | AGI number: AT1G78080.1 uORF ′5 STOP: 178 uORF 3′ STOP: 343 leader length: 541 |
| 1004 | AGI number: AT1G78080.1 uORF ′5 STOP: 178 uORF 3′ STOP: 343 leader length: 541 |
| 1005 | AGI number: AT1G78260.1 uORF ′5 STOP: 52 uORF 3′ STOP: 157 leader length: 332 |
| 1006 | AGI number: AT1G78260.1 uORF ′5 STOP: 52 uORF 3′ STOP: 157 leader length: 332 |
| 1007 | AGI number: AT1G78260.2 uORF ′5 STOP: 52 uORF 3′ STOP: 157 leader length: 332 |
| 1008 | AGI number: AT1G78260.2 uORF ′5 STOP: 52 uORF 3′ STOP: 157 leader length: 332 |
| 1009 | AGI number: AT1G78700.1 uORF ′5 STOP: 347 uORF 3′ STOP: 398 leader length: 505 |
| 1010 | AGI number: AT1G78700.1 uORF ′5 STOP: 347 uORF 3′ STOP: 398 leader length: 505 |
| 1011 | AGI number: AT1G78700.1 uORF ′5 STOP: 243 uORF 3′ STOP: 393 leader length: 505 |
| 1012 | AGI number: AT1G78700.1 uORF ′5 STOP: 243 uORF 3′ STOP: 393 leader length: 505 |
| 1013 | AGI number: AT1G78700.1 uORF ′5 STOP: 295 uORF 3′ STOP: 388 leader length: 505 |
| 1014 | AGI number: AT1G78700.1 uORF ′5 STOP: 295 uORF 3′ STOP: 388 leader length: 505 |
| 1015 | AGI number: AT1G78710.2 uORF ′5 STOP: 185 uORF 3′ STOP: 251 leader length: 246 |
| 1016 | AGI number: AT1G78710.2 uORF ′5 STOP: 185 uORF 3′ STOP: 251 leader length: 246 |
| 1017 | AGI number: AT1G78880.1 uORF ′5 STOP: 173 uORF 3′ STOP: 266 leader length: 404 |
| 1018 | AGI number: AT1G78880.1 uORF ′5 STOP: 173 uORF 3′ STOP: 266 leader length: 404 |
| 1019 | AGI number: AT1G79220.1 uORF ′5 STOP: 56 uORF 3′ STOP: 191 leader length: 292 |
| 1020 | AGI number: AT1G79220.1 uORF ′5 STOP: 56 uORF 3′ STOP: 191 leader length: 292 |
| 1021 | AGI number: AT1G79220.1 uORF ′5 STOP: 141 uORF 3′ STOP: 201 leader length: 292 |
| 1022 | AGI number: AT1G79220.1 uORF ′5 STOP: 141 uORF 3′ STOP: 201 leader length: 292 |
| 1023 | AGI number: AT1G79230.3 uORF ′5 STOP: 181 uORF 3′ STOP: 259 leader length: 471 |
| 1024 | AGI number: AT1G79230.3 uORF ′5 STOP: 181 uORF 3′ STOP: 259 leader length: 471 |
| 1025 | AGI number: AT1G79490.1 uORF ′5 STOP: 134 uORF 3′ STOP: 218 leader length: 161 |
| 1026 | AGI number: AT1G79490.1 uORF ′5 STOP: 134 uORF 3′ STOP: 218 leader length: 161 |
| 1027 | AGI number: AT1G79690.1 uORF ′5 STOP: 5 uORF 3′ STOP: 59 leader length: 184 |
| 1028 | AGI number: AT1G79690.1 uORF ′5 STOP: 5 uORF 3′ STOP: 59 leader length: 184 |
| 1029 | AGI number: AT1G79790.2 uORF ′5 STOP: 115 uORF 3′ STOP: 181 leader length: 280 |
| 1030 | AGI number: AT1G79790.2 uORF ′5 STOP: 115 uORF 3′ STOP: 181 leader length: 280 |
| 1031 | AGI number: AT1G79810.1 uORF ′5 STOP: 10 uORF 3′ STOP: 61 leader length: 200 |
| 1032 | AGI number: AT1G79810.1 uORF ′5 STOP: 10 uORF 3′ STOP: 61 leader length: 200 |
| 1033 | AGI number: AT1G79810.2 uORF ′5 STOP: 10 uORF 3′ STOP: 61 leader length: 357 |
| 1034 | AGI number: AT1G79810.2 uORF ′5 STOP: 10 uORF 3′ STOP: 61 leader length: 357 |
| 1035 | AGI number: AT1G80280.1 uORF ′5 STOP: 228 uORF 3′ STOP: 372 leader length: 445 |
| 1036 | AGI number: AT1G80280.1 uORF ′5 STOP: 228 uORF 3′ STOP: 372 leader length: 445 |
| 1037 | AGI number: AT1G80280.1 uORF ′5 STOP: 132 uORF 3′ STOP: 186 leader length: 445 |
| 1038 | AGI number: AT1G80280.1 uORF ′5 STOP: 132 uORF 3′ STOP: 186 leader length: 445 |
| 1039 | AGI number: AT1G80280.1 uORF ′5 STOP: 62 uORF 3′ STOP: 377 leader length: 445 |
| 1040 | AGI number: AT1G80280.1 uORF ′5 STOP: 62 uORF 3′ STOP: 377 leader length: 445 |
| 1041 | AGI number: AT1G80420.4 uORF ′5 STOP: 63 uORF 3′ STOP: 234 leader length: 468 |
| 1042 | AGI number: AT1G80420.4 uORF ′5 STOP: 63 uORF 3′ STOP: 234 leader length: 468 |
| 1043 | AGI number: AT1G80570.3 uORF ′5 STOP: 78 uORF 3′ STOP: 129 leader length: 465 |
| 1044 | AGI number: AT1G80570.3 uORF ′5 STOP: 78 uORF 3′ STOP: 129 leader length: 465 |
| 1045 | AGI number: AT1G80640.1 uORF ′5 STOP: 76 uORF 3′ STOP: 181 leader length: 313 |
| 1046 | AGI number: AT1G80640.1 uORF ′5 STOP: 76 uORF 3′ STOP: 181 leader length: 313 |
| 1047 | AGI number: AT1G80640.1 uORF ′5 STOP: 53 uORF 3′ STOP: 188 leader length: 313 |
| 1048 | AGI number: AT1G80640.1 uORF ′5 STOP: 53 uORF 3′ STOP: 188 leader length: 313 |
| 1049 | AGI number: AT1G80640.1 uORF ′5 STOP: 102 uORF 3′ STOP: 222 leader length: 313 |
| 1050 | AGI number: AT1G80640.1 uORF ′5 STOP: 102 uORF 3′ STOP: 222 leader length: 313 |
| 1051 | AGI number: AT1G80640.2 uORF ′5 STOP: 102 uORF 3′ STOP: 222 leader length: 313 |
| 1052 | AGI number: AT1G80640.2 uORF ′5 STOP: 102 uORF 3′ STOP: 222 leader length: 313 |
| 1053 | AGI number: AT1G80780.1 uORF ′5 STOP: 21 uORF 3′ STOP: 120 leader length: 250 |
| 1054 | AGI number: AT1G80780.1 uORF ′5 STOP: 21 uORF 3′ STOP: 120 leader length: 250 |
| 1055 | AGI number: AT1G80980.1 uORF ′5 STOP: 393 uORF 3′ STOP: 522 leader length: 647 |
| 1056 | AGI number: AT1G80980.1 uORF ′5 STOP: 393 uORF 3′ STOP: 522 leader length: 647 |
| 1057 | AGI number: AT1G80980.1 uORF ′5 STOP: 285 uORF 3′ STOP: 342 leader length: 647 |
| 1058 | AGI number: AT1G80980.1 uORF ′5 STOP: 285 uORF 3′ STOP: 342 leader length: 647 |
| 1059 | AGI number: AT2G01100.3 uORF ′5 STOP: 325 uORF 3′ STOP: 388 leader length: 581 |
| 1060 | AGI number: AT2G01100.3 uORF ′5 STOP: 325 uORF 3′ STOP: 388 leader length: 581 |
| 1061 | AGI number: AT2G01175.1 uORF ′5 STOP: 419 uORF 3′ STOP: 473 leader length: 456 |
| 1062 | AGI number: AT2G01175.1 uORF ′5 STOP: 419 uORF 3′ STOP: 473 leader length: 456 |
| 1063 | AGI number: AT2G01350.2 uORF ′5 STOP: 24 uORF 3′ STOP: 246 leader length: 317 |
| 1064 | AGI number: AT2G01350.2 uORF ′5 STOP: 24 uORF 3′ STOP: 246 leader length: 317 |
| 1065 | AGI number: AT2G01690.1 uORF ′5 STOP: 120 uORF 3′ STOP: 180 leader length: 306 |
| 1066 | AGI number: AT2G01690.1 uORF ′5 STOP: 120 uORF 3′ STOP: 180 leader length: 306 |
| 1067 | AGI number: AT2G01690.1 uORF ′5 STOP: 77 uORF 3′ STOP: 158 leader length: 306 |
| 1068 | AGI number: AT2G01690.1 uORF ′5 STOP: 77 uORF 3′ STOP: 158 leader length: 306 |
| 1069 | AGI number: AT2G01690.2 uORF ′5 STOP: 77 uORF 3′ STOP: 158 leader length: 306 |
| 1070 | AGI number: AT2G01690.2 uORF ′5 STOP: 77 uORF 3′ STOP: 158 leader length: 306 |
| 1071 | AGI number: AT2G01730.1 uORF ′5 STOP: 68 uORF 3′ STOP: 191 leader length: 119 |
| 1072 | AGI number: AT2G01730.1 uORF ′5 STOP: 68 uORF 3′ STOP: 191 leader length: 119 |
| 1073 | AGI number: AT2G01930.2 uORF ′5 STOP: 237 uORF 3′ STOP: 303 leader length: 474 |
| 1074 | AGI number: AT2G01930.2 uORF ′5 STOP: 237 uORF 3′ STOP: 303 leader length: 474 |
| 1075 | AGI number: AT2G01930.2 uORF ′5 STOP: 259 uORF 3′ STOP: 346 leader length: 474 |
| 1076 | AGI number: AT2G01930.2 uORF ′5 STOP: 259 uORF 3′ STOP: 346 leader length: 474 |
| 1077 | AGI number: AT2G02710.1 uORF ′5 STOP: 25 uORF 3′ STOP: 274 leader length: 263 |
| 1078 | AGI number: AT2G02710.1 uORF ′5 STOP: 25 uORF 3′ STOP: 274 leader length: 263 |
| 1079 | AGI number: AT2G02710.2 uORF ′5 STOP: 114 uORF 3′ STOP: 249 leader length: 405 |
| 1080 | AGI number: AT2G02710.2 uORF ′5 STOP: 114 uORF 3′ STOP: 249 leader length: 405 |
| 1081 | AGI number: AT2G02870.1 uORF ′5 STOP: 155 uORF 3′ STOP: 236 leader length: 438 |
| 1082 | AGI number: AT2G02870.1 uORF ′5 STOP: 155 uORF 3′ STOP: 236 leader length: 438 |
| 1083 | AGI number: AT2G02930.1 uORF ′5 STOP: 103 uORF 3′ STOP: 343 leader length: 116 |
| 1084 | AGI number: AT2G02930.1 uORF ′5 STOP: 103 uORF 3′ STOP: 343 leader length: 116 |
| 1085 | AGI number: AT2G02960.5 uORF ′5 STOP: 45 uORF 3′ STOP: 117 leader length: 379 |
| 1086 | AGI number: AT2G02960.5 uORF ′5 STOP: 45 uORF 3′ STOP: 117 leader length: 379 |
| 1087 | AGI number: AT2G02970.1 uORF ′5 STOP: 12 uORF 3′ STOP: 114 leader length: 282 |
| 1088 | AGI number: AT2G02970.1 uORF ′5 STOP: 12 uORF 3′ STOP: 114 leader length: 282 |
| 1089 | AGI number: AT2G03070.1 uORF ′5 STOP: 46 uORF 3′ STOP: 148 leader length: 233 |
| 1090 | AGI number: AT2G03070.1 uORF ′5 STOP: 46 uORF 3′ STOP: 148 leader length: 233 |
| 1091 | AGI number: AT2G03340.1 uORF ′5 STOP: 36 uORF 3′ STOP: 108 leader length: 212 |
| 1092 | AGI number: AT2G03340.1 uORF ′5 STOP: 36 uORF 3′ STOP: 108 leader length: 212 |
| 1093 | AGI number: AT2G03530.1 uORF ′5 STOP: 94 uORF 3′ STOP: 259 leader length: 127 |
| 1094 | AGI number: AT2G03530.1 uORF ′5 STOP: 94 uORF 3′ STOP: 259 leader length: 127 |
| 1095 | AGI number: AT2G03810.2 uORF ′5 STOP: 7 uORF 3′ STOP: 70 leader length: 338 |
| 1096 | AGI number: AT2G03810.2 uORF ′5 STOP: 7 uORF 3′ STOP: 70 leader length: 338 |
| 1097 | AGI number: AT2G03890.1 uORF ′5 STOP: 82 uORF 3′ STOP: 214 leader length: 546 |
| 1098 | AGI number: AT2G03890.1 uORF ′5 STOP: 82 uORF 3′ STOP: 214 leader length: 546 |
| 1099 | AGI number: AT2G03890.1 uORF ′5 STOP: 244 uORF 3′ STOP: 307 leader length: 546 |
| 1100 | AGI number: AT2G03890.1 uORF ′5 STOP: 244 uORF 3′ STOP: 307 leader length: 546 |
| 1101 | AGI number: AT2G03890.2 uORF ′5 STOP: 79 uORF 3′ STOP: 211 leader length: 543 |
| 1102 | AGI number: AT2G03890.2 uORF ′5 STOP: 79 uORF 3′ STOP: 211 leader length: 543 |
| 1103 | AGI number: AT2G04039.2 uORF ′5 STOP: 288 uORF 3′ STOP: 378 leader length: 369 |
| 1104 | AGI number: AT2G04039.2 uORF ′5 STOP: 288 uORF 3′ STOP: 378 leader length: 369 |
| 1105 | AGI number: AT2G04039.2 uORF ′5 STOP: 149 uORF 3′ STOP: 371 leader length: 369 |
| 1106 | AGI number: AT2G04039.2 uORF ′5 STOP: 149 uORF 3′ STOP: 371 leader length: 369 |
| 1107 | AGI number: AT2G04039.2 uORF ′5 STOP: 307 uORF 3′ STOP: 364 leader length: 369 |
| 1108 | AGI number: AT2G04039.2 uORF ′5 STOP: 307 uORF 3′ STOP: 364 leader length: 369 |
| 1109 | AGI number: AT2G04240.2 uORF ′5 STOP: 87 uORF 3′ STOP: 153 leader length: 633 |
| 1110 | AGI number: AT2G04240.2 uORF ′5 STOP: 87 uORF 3′ STOP: 153 leader length: 633 |
| 1111 | AGI number: AT2G04378.1 uORF ′5 STOP: 179 uORF 3′ STOP: 431 leader length: 706 |
| 1112 | AGI number: AT2G04378.1 uORF ′5 STOP: 179 uORF 3′ STOP: 431 leader length: 706 |
| 1113 | AGI number: AT2G04890.1 uORF ′5 STOP: 69 uORF 3′ STOP: 123 leader length: 407 |
| 1114 | AGI number: AT2G04890.1 uORF ′5 STOP: 69 uORF 3′ STOP: 123 leader length: 407 |
| 1115 | AGI number: AT2G04890.1 uORF ′5 STOP: 5 uORF 3′ STOP: 110 leader length: 407 |
| 1116 | AGI number: AT2G04890.1 uORF ′5 STOP: 5 uORF 3′ STOP: 110 leader length: 407 |
| 1117 | AGI number: AT2G04890.1 uORF ′5 STOP: 21 uORF 3′ STOP: 72 leader length: 407 |
| 1118 | AGI number: AT2G04890.1 uORF ′5 STOP: 21 uORF 3′ STOP: 72 leader length: 407 |
| 1119 | AGI number: AT2G04890.1 uORF ′5 STOP: 79 uORF 3′ STOP: 145 leader length: 407 |
| 1120 | AGI number: AT2G04890.1 uORF ′5 STOP: 79 uORF 3′ STOP: 145 leader length: 407 |
| 1121 | AGI number: AT2G05160.1 uORF ′5 STOP: 336 uORF 3′ STOP: 411 leader length: 357 |
| 1122 | AGI number: AT2G05160.1 uORF ′5 STOP: 336 uORF 3′ STOP: 411 leader length: 357 |
| 1123 | AGI number: AT2G05210.1 uORF ′5 STOP: 80 uORF 3′ STOP: 134 leader length: 418 |
| 1124 | AGI number: AT2G05210.1 uORF ′5 STOP: 80 uORF 3′ STOP: 134 leader length: 418 |
| 1125 | AGI number: AT2G05210.1 uORF ′5 STOP: 232 uORF 3′ STOP: 304 leader length: 418 |
| 1126 | AGI number: AT2G05210.1 uORF ′5 STOP: 232 uORF 3′ STOP: 304 leader length: 418 |
| 1127 | AGI number: AT2G05210.1 uORF ′5 STOP: 242 uORF 3′ STOP: 332 leader length: 418 |
| 1128 | AGI number: AT2G05210.1 uORF ′5 STOP: 242 uORF 3′ STOP: 332 leader length: 418 |
| 1129 | AGI number: AT2G05210.2 uORF ′5 STOP: 77 uORF 3′ STOP: 131 leader length: 481 |
| 1130 | AGI number: AT2G05210.2 uORF ′5 STOP: 77 uORF 3′ STOP: 131 leader length: 481 |
| 1131 | AGI number: AT2G05210.2 uORF ′5 STOP: 140 uORF 3′ STOP: 239 leader length: 481 |
| 1132 | AGI number: AT2G05210.2 uORF ′5 STOP: 140 uORF 3′ STOP: 239 leader length: 481 |
| 1133 | AGI number: AT2G05210.3 uORF ′5 STOP: 215 uORF 3′ STOP: 317 leader length: 400 |
| 1134 | AGI number: AT2G05210.3 uORF ′5 STOP: 215 uORF 3′ STOP: 317 leader length: 400 |
| 1135 | AGI number: AT2G05210.3 uORF ′5 STOP: 237 uORF 3′ STOP: 309 leader length: 400 |
| 1136 | AGI number: AT2G05210.3 uORF ′5 STOP: 237 uORF 3′ STOP: 309 leader length: 400 |
| 1137 | AGI number: AT2G05630.2 uORF ′5 STOP: 2 uORF 3′ STOP: 119 leader length: 107 |
| 1138 | AGI number: AT2G05630.2 uORF ′5 STOP: 2 uORF 3′ STOP: 119 leader length: 107 |
| 1139 | AGI number: AT2G05632.1 uORF ′5 STOP: 80 uORF 3′ STOP: 191 leader length: 228 |
| 1140 | AGI number: AT2G05632.1 uORF ′5 STOP: 80 uORF 3′ STOP: 191 leader length: 228 |
| 1141 | AGI number: AT2G05632.1 uORF ′5 STOP: 27 uORF 3′ STOP: 177 leader length: 228 |
| 1142 | AGI number: AT2G05632.1 uORF ′5 STOP: 27 uORF 3′ STOP: 177 leader length: 228 |
| 1143 | AGI number: AT2G07727.1 uORF ′5 STOP: 98 uORF 3′ STOP: 152 leader length: 285 |
| 1144 | AGI number: AT2G07727.1 uORF ′5 STOP: 98 uORF 3′ STOP: 152 leader length: 285 |
| 1145 | AGI number: AT2G12200.1 uORF ′5 STOP: 35 uORF 3′ STOP: 110 leader length: 38 |
| 1146 | AGI number: AT2G12200.1 uORF ′5 STOP: 35 uORF 3′ STOP: 110 leader length: 38 |
| 1147 | AGI number: AT2G12280.1 uORF ′5 STOP: 2 uORF 3′ STOP: 215 leader length: 42 |
| 1148 | AGI number: AT2G12280.1 uORF ′5 STOP: 2 uORF 3′ STOP: 215 leader length: 42 |
| 1149 | AGI number: AT2G13660.1 uORF ′5 STOP: 109 uORF 3′ STOP: 319 leader length: 127 |
| 1150 | AGI number: AT2G13660.1 uORF ′5 STOP: 109 uORF 3′ STOP: 319 leader length: 127 |
| 1151 | AGI number: AT2G15530.3 uORF ′5 STOP: 151 uORF 3′ STOP: 265 leader length: 546 |
| 1152 | AGI number: AT2G15530.3 uORF ′5 STOP: 151 uORF 3′ STOP: 265 leader length: 546 |
| 1153 | AGI number: AT2G15530.3 uORF ′5 STOP: 243 uORF 3′ STOP: 300 leader length: 546 |
| 1154 | AGI number: AT2G15530.3 uORF ′5 STOP: 243 uORF 3′ STOP: 300 leader length: 546 |
| 1155 | AGI number: AT2G16400.1 uORF ′5 STOP: 313 uORF 3′ STOP: 364 leader length: 547 |
| 1156 | AGI number: AT2G16400.1 uORF ′5 STOP: 313 uORF 3′ STOP: 364 leader length: 547 |
| 1157 | AGI number: AT2G16400.1 uORF ′5 STOP: 287 uORF 3′ STOP: 359 leader length: 547 |
| 1158 | AGI number: AT2G16400.1 uORF ′5 STOP: 287 uORF 3′ STOP: 359 leader length: 547 |
| 1159 | AGI number: AT2G16430.1 uORF ′5 STOP: 283 uORF 3′ STOP: 430 leader length: 502 |
| 1160 | AGI number: AT2G16430.1 uORF ′5 STOP: 283 uORF 3′ STOP: 430 leader length: 502 |
| 1161 | AGI number: AT2G16430.1 uORF ′5 STOP: 332 uORF 3′ STOP: 446 leader length: 502 |
| 1162 | AGI number: AT2G16430.1 uORF ′5 STOP: 332 uORF 3′ STOP: 446 leader length: 502 |
| 1163 | AGI number: AT2G16586.1 uORF ′5 STOP: 475 uORF 3′ STOP: 613 leader length: 712 |
| 1164 | AGI number: AT2G16586.1 uORF ′5 STOP: 475 uORF 3′ STOP: 613 leader length: 712 |
| 1165 | AGI number: AT2G16586.1 uORF ′5 STOP: 419 uORF 3′ STOP: 632 leader length: 712 |
| 1166 | AGI number: AT2G16586.1 uORF ′5 STOP: 419 uORF 3′ STOP: 632 leader length: 712 |
| 1167 | AGI number: AT2G16900.3 uORF ′5 STOP: 342 uORF 3′ STOP: 393 leader length: 682 |
| 1168 | AGI number: AT2G16900.3 uORF ′5 STOP: 342 uORF 3′ STOP: 393 leader length: 682 |
| 1169 | AGI number: AT2G16900.3 uORF ′5 STOP: 362 uORF 3′ STOP: 428 leader length: 682 |
| 1170 | AGI number: AT2G16900.3 uORF ′5 STOP: 362 uORF 3′ STOP: 428 leader length: 682 |
| 1171 | AGI number: AT2G17370.1 uORF ′5 STOP: 13 uORF 3′ STOP: 130 leader length: 232 |
| 1172 | AGI number: AT2G17370.1 uORF ′5 STOP: 13 uORF 3′ STOP: 130 leader length: 232 |
| 1173 | AGI number: AT2G17440.1 uORF ′5 STOP: 10 uORF 3′ STOP: 121 leader length: 191 |
| 1174 | AGI number: AT2G17440.1 uORF ′5 STOP: 10 uORF 3′ STOP: 121 leader length: 191 |
| 1175 | AGI number: AT2G17480.1 uORF ′5 STOP: 186 uORF 3′ STOP: 243 leader length: 322 |
| 1176 | AGI number: AT2G17480.1 uORF ′5 STOP: 186 uORF 3′ STOP: 243 leader length: 322 |
| 1177 | AGI number: AT2G17540.3 uORF ′5 STOP: 62 uORF 3′ STOP: 122 leader length: 225 |
| 1178 | AGI number: AT2G17540.3 uORF ′5 STOP: 62 uORF 3′ STOP: 122 leader length: 225 |
| 1179 | AGI number: AT2G17550.1 uORF ′5 STOP: 175 uORF 3′ STOP: 226 leader length: 620 |
| 1180 | AGI number: AT2G17550.1 uORF ′5 STOP: 175 uORF 3′ STOP: 226 leader length: 620 |
| 1181 | AGI number: AT2G17550.2 uORF ′5 STOP: 583 uORF 3′ STOP: 787 leader length: 945 |
| 1182 | AGI number: AT2G17550.2 uORF ′5 STOP: 583 uORF 3′ STOP: 787 leader length: 945 |
| 1183 | AGI number: AT2G17550.2 uORF ′5 STOP: 465 uORF 3′ STOP: 795 leader length: 945 |
| 1184 | AGI number: AT2G17550.2 uORF ′5 STOP: 465 uORF 3′ STOP: 795 leader length: 945 |
| 1185 | AGI number: AT2G18150.1 uORF ′5 STOP: 63 uORF 3′ STOP: 225 leader length: 67 |
| 1186 | AGI number: AT2G18150.1 uORF ′5 STOP: 63 uORF 3′ STOP: 225 leader length: 67 |
| 1187 | AGI number: AT2G18160.1 uORF ′5 STOP: 263 uORF 3′ STOP: 344 leader length: 439 |
| 1188 | AGI number: AT2G18160.1 uORF ′5 STOP: 263 uORF 3′ STOP: 344 leader length: 439 |
| 1189 | AGI number: AT2G18160.1 uORF ′5 STOP: 168 uORF 3′ STOP: 327 leader length: 439 |
| 1190 | AGI number: AT2G18160.1 uORF ′5 STOP: 168 uORF 3′ STOP: 327 leader length: 439 |
| 1191 | AGI number: AT2G18876.2 uORF ′5 STOP: 64 uORF 3′ STOP: 148 leader length: 592 |
| 1192 | AGI number: AT2G18876.2 uORF ′5 STOP: 64 uORF 3′ STOP: 148 leader length: 592 |
| 1193 | AGI number: AT2G18970.1 uORF ′5 STOP: 211 uORF 3′ STOP: 355 leader length: 257 |
| 1194 | AGI number: AT2G18970.1 uORF ′5 STOP: 211 uORF 3′ STOP: 355 leader length: 257 |
| 1195 | AGI number: AT2G19170.1 uORF ′5 STOP: 84 uORF 3′ STOP: 147 leader length: 309 |
| 1196 | AGI number: AT2G19170.1 uORF ′5 STOP: 84 uORF 3′ STOP: 147 leader length: 309 |
| 1197 | AGI number: AT2G19170.1 uORF ′5 STOP: 94 uORF 3′ STOP: 169 leader length: 309 |
| 1198 | AGI number: AT2G19170.1 uORF ′5 STOP: 94 uORF 3′ STOP: 169 leader length: 309 |
| 1199 | AGI number: AT2G19390.1 uORF ′5 STOP: 6 uORF 3′ STOP: 132 leader length: 442 |
| 1200 | AGI number: AT2G19390.1 uORF ′5 STOP: 6 uORF 3′ STOP: 132 leader length: 442 |
| 1201 | AGI number: AT2G19390.1 uORF ′5 STOP: 80 uORF 3′ STOP: 158 leader length: 442 |
| 1202 | AGI number: AT2G19390.1 uORF ′5 STOP: 80 uORF 3′ STOP: 158 leader length: 442 |
| 1203 | AGI number: AT2G19470.1 uORF ′5 STOP: 4 uORF 3′ STOP: 88 leader length: 258 |
| 1204 | AGI number: AT2G19470.1 uORF ′5 STOP: 4 uORF 3′ STOP: 88 leader length: 258 |
| 1205 | AGI number: AT2G19490.1 uORF ′5 STOP: 51 uORF 3′ STOP: 117 leader length: 205 |
| 1206 | AGI number: AT2G19490.1 uORF ′5 STOP: 51 uORF 3′ STOP: 117 leader length: 205 |
| 1207 | AGI number: AT2G19880.1 uORF ′5 STOP: 49 uORF 3′ STOP: 103 leader length: 220 |
| 1208 | AGI number: AT2G19880.1 uORF ′5 STOP: 49 uORF 3′ STOP: 103 leader length: 220 |
| 1209 | AGI number: AT2G20010.1 uORF ′5 STOP: 20 uORF 3′ STOP: 134 leader length: 543 |
| 1210 | AGI number: AT2G20010.1 uORF ′5 STOP: 20 uORF 3′ STOP: 134 leader length: 543 |
| 1211 | AGI number: AT2G20010.2 uORF ′5 STOP: 102 uORF 3′ STOP: 216 leader length: 372 |
| 1212 | AGI number: AT2G20010.2 uORF ′5 STOP: 102 uORF 3′ STOP: 216 leader length: 372 |
| 1213 | AGI number: AT2G20080.1 uORF ′5 STOP: 101 uORF 3′ STOP: 152 leader length: 291 |
| 1214 | AGI number: AT2G20080.1 uORF ′5 STOP: 101 uORF 3′ STOP: 152 leader length: 291 |
| 1215 | AGI number: AT2G20080.2 uORF ′5 STOP: 101 uORF 3′ STOP: 152 leader length: 291 |
| 1216 | AGI number: AT2G20080.2 uORF ′5 STOP: 101 uORF 3′ STOP: 152 leader length: 291 |
| 1217 | AGI number: AT2G20440.1 uORF ′5 STOP: 32 uORF 3′ STOP: 110 leader length: 140 |
| 1218 | AGI number: AT2G20440.1 uORF ′5 STOP: 32 uORF 3′ STOP: 110 leader length: 140 |
| 1219 | AGI number: AT2G20680.1 uORF ′5 STOP: 194 uORF 3′ STOP: 302 leader length: 557 |
| 1220 | AGI number: AT2G20680.1 uORF ′5 STOP: 194 uORF 3′ STOP: 302 leader length: 557 |
| 1221 | AGI number: AT2G20780.1 uORF ′5 STOP: 33 uORF 3′ STOP: 132 leader length: 243 |
| 1222 | AGI number: AT2G20780.1 uORF ′5 STOP: 33 uORF 3′ STOP: 132 leader length: 243 |
| 1223 | AGI number: AT2G20815.2 uORF ′5 STOP: 314 uORF 3′ STOP: 365 leader length: 733 |
| 1224 | AGI number: AT2G20815.2 uORF ′5 STOP: 314 uORF 3′ STOP: 365 leader length: 733 |
| 1225 | AGI number: AT2G20830.1 uORF ′5 STOP: 544 uORF 3′ STOP: 727 leader length: 832 |
| 1226 | AGI number: AT2G20830.1 uORF ′5 STOP: 544 uORF 3′ STOP: 727 leader length: 832 |
| 1227 | AGI number: AT2G20830.1 uORF ′5 STOP: 125 uORF 3′ STOP: 584 leader length: 832 |
| 1228 | AGI number: AT2G20830.1 uORF ′5 STOP: 125 uORF 3′ STOP: 584 leader length: 832 |
| 1229 | AGI number: AT2G20990.2 uORF ′5 STOP: 4 uORF 3′ STOP: 133 leader length: 275 |
| 1230 | AGI number: AT2G20990.2 uORF ′5 STOP: 4 uORF 3′ STOP: 133 leader length: 275 |
| 1231 | AGI number: AT2G20990.3 uORF ′5 STOP: 4 uORF 3′ STOP: 133 leader length: 275 |
| 1232 | AGI number: AT2G20990.3 uORF ′5 STOP: 4 uORF 3′ STOP: 133 leader length: 275 |
| 1233 | AGI number: AT2G21300.1 uORF ′5 STOP: 91 uORF 3′ STOP: 163 leader length: 242 |
| 1234 | AGI number: AT2G21300.1 uORF ′5 STOP: 91 uORF 3′ STOP: 163 leader length: 242 |
| 1235 | AGI number: AT2G21520.1 uORF ′5 STOP: 177 uORF 3′ STOP: 306 leader length: 437 |
| 1236 | AGI number: AT2G21520.1 uORF ′5 STOP: 177 uORF 3′ STOP: 306 leader length: 437 |
| 1237 | AGI number: AT2G21940.2 uORF ′5 STOP: 160 uORF 3′ STOP: 211 leader length: 277 |
| 1238 | AGI number: AT2G21940.2 uORF ′5 STOP: 160 uORF 3′ STOP: 211 leader length: 277 |
| 1239 | AGI number: AT2G22670.2 uORF ′5 STOP: 61 uORF 3′ STOP: 154 leader length: 228 |
| 1240 | AGI number: AT2G22670.2 uORF ′5 STOP: 61 uORF 3′ STOP: 154 leader length: 228 |
| 1241 | AGI number: AT2G22670.3 uORF ′5 STOP: 9 uORF 3′ STOP: 102 leader length: 179 |
| 1242 | AGI number: AT2G22670.3 uORF ′5 STOP: 9 uORF 3′ STOP: 102 leader length: 179 |
| 1243 | AGI number: AT2G22670.4 uORF ′5 STOP: 121 uORF 3′ STOP: 214 leader length: 327 |
| 1244 | AGI number: AT2G22670.4 uORF ′5 STOP: 121 uORF 3′ STOP: 214 leader length: 327 |
| 1245 | AGI number: AT2G22670.4 uORF ′5 STOP: 32 uORF 3′ STOP: 284 leader length: 327 |
| 1246 | AGI number: AT2G22670.4 uORF ′5 STOP: 32 uORF 3′ STOP: 284 leader length: 327 |
| 1247 | AGI number: AT2G22670.4 uORF ′5 STOP: 60 uORF 3′ STOP: 159 leader length: 327 |
| 1248 | AGI number: AT2G22670.4 uORF ′5 STOP: 60 uORF 3′ STOP: 159 leader length: 327 |
| 1249 | AGI number: AT2G23680.2 uORF ′5 STOP: 74 uORF 3′ STOP: 224 leader length: 297 |
| 1250 | AGI number: AT2G23680.2 uORF ′5 STOP: 74 uORF 3′ STOP: 224 leader length: 297 |
| 1251 | AGI number: AT2G23700.1 uORF ′5 STOP: 138 uORF 3′ STOP: 264 leader length: 383 |
| 1252 | AGI number: AT2G23700.1 uORF ′5 STOP: 138 uORF 3′ STOP: 264 leader length: 383 |
| 1253 | AGI number: AT2G23985.1 uORF ′5 STOP: 22 uORF 3′ STOP: 94 leader length: 298 |
| 1254 | AGI number: AT2G23985.1 uORF ′5 STOP: 22 uORF 3′ STOP: 94 leader length: 298 |
| 1255 | AGI number: AT2G23985.2 uORF ′5 STOP: 113 uORF 3′ STOP: 206 leader length: 310 |
| 1256 | AGI number: AT2G23985.2 uORF ′5 STOP: 113 uORF 3′ STOP: 206 leader length: 310 |
| 1257 | AGI number: AT2G23985.2 uORF ′5 STOP: 22 uORF 3′ STOP: 94 leader length: 310 |
| 1258 | AGI number: AT2G23985.2 uORF ′5 STOP: 22 uORF 3′ STOP: 94 leader length: 310 |
| 1259 | AGI number: AT2G24280.1 uORF ′5 STOP: 213 uORF 3′ STOP: 327 leader length: 1338 |
| 1260 | AGI number: AT2G24280.1 uORF ′5 STOP: 213 uORF 3′ STOP: 327 leader length: 1338 |
| 1261 | AGI number: AT2G24280.1 uORF ′5 STOP: 307 uORF 3′ STOP: 424 leader length: 1338 |
| 1262 | AGI number: AT2G24280.1 uORF ′5 STOP: 307 uORF 3′ STOP: 424 leader length: 1338 |
| 1263 | AGI number: AT2G24280.1 uORF ′5 STOP: 269 uORF 3′ STOP: 323 leader length: 1338 |
| 1264 | AGI number: AT2G24280.1 uORF ′5 STOP: 269 uORF 3′ STOP: 323 leader length: 1338 |
| 1265 | AGI number: AT2G24390.3 uORF ′5 STOP: 26 uORF 3′ STOP: 95 leader length: 226 |
| 1266 | AGI number: AT2G24390.3 uORF ′5 STOP: 26 uORF 3′ STOP: 95 leader length: 226 |
| 1267 | AGI number: AT2G24530.1 uORF ′5 STOP: 151 uORF 3′ STOP: 217 leader length: 310 |
| 1268 | AGI number: AT2G24530.1 uORF ′5 STOP: 151 uORF 3′ STOP: 217 leader length: 310 |
| 1269 | AGI number: AT2G24530.1 uORF ′5 STOP: 62 uORF 3′ STOP: 221 leader length: 310 |
| 1270 | AGI number: AT2G24530.1 uORF ′5 STOP: 62 uORF 3′ STOP: 221 leader length: 310 |
| 1271 | AGI number: AT2G24630.1 uORF ′5 STOP: 240 uORF 3′ STOP: 294 leader length: 386 |
| 1272 | AGI number: AT2G24630.1 uORF ′5 STOP: 240 uORF 3′ STOP: 294 leader length: 386 |
| 1273 | AGI number: AT2G24630.1 uORF ′5 STOP: 233 uORF 3′ STOP: 299 leader length: 386 |
| 1274 | AGI number: AT2G24630.1 uORF ′5 STOP: 233 uORF 3′ STOP: 299 leader length: 386 |
| 1275 | AGI number: AT2G24640.2 uORF ′5 STOP: 166 uORF 3′ STOP: 358 leader length: 692 |
| 1276 | AGI number: AT2G24640.2 uORF ′5 STOP: 166 uORF 3′ STOP: 358 leader length: 692 |
| 1277 | AGI number: AT2G24945.1 uORF ′5 STOP: 1398 uORF 3′ STOP: 1452 leader length: 2331 |
| 1278 | AGI number: AT2G24945.1 uORF ′5 STOP: 1398 uORF 3′ STOP: 1452 leader length: 2331 |
| 1279 | AGI number: AT2G24945.1 uORF ′5 STOP: 210 uORF 3′ STOP: 351 leader length: 2331 |
| 1280 | AGI number: AT2G24945.1 uORF ′5 STOP: 210 uORF 3′ STOP: 351 leader length: 2331 |
| 1281 | AGI number: AT2G25190.1 uORF ′5 STOP: 35 uORF 3′ STOP: 146 leader length: 241 |
| 1282 | AGI number: AT2G25190.1 uORF ′5 STOP: 35 uORF 3′ STOP: 146 leader length: 241 |
| 1283 | AGI number: AT2G25510.1 uORF ′5 STOP: 36 uORF 3′ STOP: 363 leader length: 186 |
| 1284 | AGI number: AT2G25510.1 uORF ′5 STOP: 36 uORF 3′ STOP: 363 leader length: 186 |
| 1285 | AGI number: AT2G25700.1 uORF ′5 STOP: 51 uORF 3′ STOP: 123 leader length: 75 |
| 1286 | AGI number: AT2G25700.1 uORF ′5 STOP: 51 uORF 3′ STOP: 123 leader length: 75 |
| 1287 | AGI number: AT2G26430.3 uORF ′5 STOP: 241 uORF 3′ STOP: 298 leader length: 373 |
| 1288 | AGI number: AT2G26430.3 uORF ′5 STOP: 241 uORF 3′ STOP: 298 leader length: 373 |
| 1289 | AGI number: AT2G27030.2 uORF ′5 STOP: 52 uORF 3′ STOP: 187 leader length: 712 |
| 1290 | AGI number: AT2G27030.2 uORF ′5 STOP: 52 uORF 3′ STOP: 187 leader length: 712 |
| 1291 | AGI number: AT2G27030.2 uORF ′5 STOP: 15 uORF 3′ STOP: 174 leader length: 712 |
| 1292 | AGI number: AT2G27030.2 uORF ′5 STOP: 15 uORF 3′ STOP: 174 leader length: 712 |
| 1293 | AGI number: AT2G27060.1 uORF ′5 STOP: 73 uORF 3′ STOP: 163 leader length: 247 |
| 1294 | AGI number: AT2G27060.1 uORF ′5 STOP: 73 uORF 3′ STOP: 163 leader length: 247 |
| 1295 | AGI number: AT2G27110.2 uORF ′5 STOP: 3 uORF 3′ STOP: 81 leader length: 389 |
| 1296 | AGI number: AT2G27110.2 uORF ′5 STOP: 3 uORF 3′ STOP: 81 leader length: 389 |
| 1297 | AGI number: AT2G27228.1 uORF ′5 STOP: 85 uORF 3′ STOP: 139 leader length: 234 |
| 1298 | AGI number: AT2G27228.1 uORF ′5 STOP: 85 uORF 3′ STOP: 139 leader length: 234 |
| 1299 | AGI number: AT2G27228.1 uORF ′5 STOP: 26 uORF 3′ STOP: 158 leader length: 234 |
| 1300 | AGI number: AT2G27228.1 uORF ′5 STOP: 26 uORF 3′ STOP: 158 leader length: 234 |
| 1301 | AGI number: AT2G27230.1 uORF ′5 STOP: 85 uORF 3′ STOP: 139 leader length: 412 |
| 1302 | AGI number: AT2G27230.1 uORF ′5 STOP: 85 uORF 3′ STOP: 139 leader length: 412 |
| 1303 | AGI number: AT2G27230.1 uORF ′5 STOP: 169 uORF 3′ STOP: 340 leader length: 412 |
| 1304 | AGI number: AT2G27230.1 uORF ′5 STOP: 169 uORF 3′ STOP: 340 leader length: 412 |
| 1305 | AGI number: AT2G27230.1 uORF ′5 STOP: 26 uORF 3′ STOP: 158 leader length: 412 |
| 1306 | AGI number: AT2G27230.1 uORF ′5 STOP: 26 uORF 3′ STOP: 158 leader length: 412 |
| 1307 | AGI number: AT2G27230.2 uORF ′5 STOP: 168 uORF 3′ STOP: 339 leader length: 449 |
| 1308 | AGI number: AT2G27230.2 uORF ′5 STOP: 168 uORF 3′ STOP: 339 leader length: 449 |
| 1309 | AGI number: AT2G27230.2 uORF ′5 STOP: 296 uORF 3′ STOP: 377 leader length: 449 |
| 1310 | AGI number: AT2G27230.2 uORF ′5 STOP: 296 uORF 3′ STOP: 377 leader length: 449 |
| 1311 | AGI number: AT2G27230.2 uORF ′5 STOP: 265 uORF 3′ STOP: 367 leader length: 449 |
| 1312 | AGI number: AT2G27230.2 uORF ′5 STOP: 265 uORF 3′ STOP: 367 leader length: 449 |
| 1313 | AGI number: AT2G27230.2 uORF ′5 STOP: 25 uORF 3′ STOP: 157 leader length: 449 |
| 1314 | AGI number: AT2G27230.2 uORF ′5 STOP: 25 uORF 3′ STOP: 157 leader length: 449 |
| 1315 | AGI number: AT2G27340.2 uORF ′5 STOP: 12 uORF 3′ STOP: 150 leader length: 575 |
| 1316 | AGI number: AT2G27340.2 uORF ′5 STOP: 12 uORF 3′ STOP: 150 leader length: 575 |
| 1317 | AGI number: AT2G27340.2 uORF ′5 STOP: 536 uORF 3′ STOP: 677 leader length: 575 |
| 1318 | AGI number: AT2G27340.2 uORF ′5 STOP: 536 uORF 3′ STOP: 677 leader length: 575 |
| 1319 | AGI number: AT2G27340.4 uORF ′5 STOP: 52 uORF 3′ STOP: 184 leader length: 289 |
| 1320 | AGI number: AT2G27340.4 uORF ′5 STOP: 52 uORF 3′ STOP: 184 leader length: 289 |
| 1321 | AGI number: AT2G27350.5 uORF ′5 STOP: 8 uORF 3′ STOP: 185 leader length: 535 |
| 1322 | AGI number: AT2G27350.5 uORF ′5 STOP: 8 uORF 3′ STOP: 185 leader length: 535 |
| 1323 | AGI number: AT2G27402.1 uORF ′5 STOP: 32 uORF 3′ STOP: 95 leader length: 506 |
| 1324 | AGI number: AT2G27402.1 uORF ′5 STOP: 32 uORF 3′ STOP: 95 leader length: 506 |
| 1325 | AGI number: AT2G27830.1 uORF ′5 STOP: 155 uORF 3′ STOP: 221 leader length: 516 |
| 1326 | AGI number: AT2G27830.1 uORF ′5 STOP: 155 uORF 3′ STOP: 221 leader length: 516 |
| 1327 | AGI number: AT2G27950.1 uORF ′5 STOP: 140 uORF 3′ STOP: 299 leader length: 407 |
| 1328 | AGI number: AT2G27950.1 uORF ′5 STOP: 140 uORF 3′ STOP: 299 leader length: 407 |
| 1329 | AGI number: AT2G28105.1 uORF ′5 STOP: 295 uORF 3′ STOP: 490 leader length: 302 |
| 1330 | AGI number: AT2G28105.1 uORF ′5 STOP: 295 uORF 3′ STOP: 490 leader length: 302 |
| 1331 | AGI number: AT2G28105.1 uORF ′5 STOP: 121 uORF 3′ STOP: 181 leader length: 302 |
| 1332 | AGI number: AT2G28105.1 uORF ′5 STOP: 121 uORF 3′ STOP: 181 leader length: 302 |
| 1333 | AGI number: AT2G28320.1 uORF ′5 STOP: 98 uORF 3′ STOP: 179 leader length: 415 |
| 1334 | AGI number: AT2G28320.1 uORF ′5 STOP: 98 uORF 3′ STOP: 179 leader length: 415 |
| 1335 | AGI number: AT2G28380.1 uORF ′5 STOP: 134 uORF 3′ STOP: 200 leader length: 265 |
| 1336 | AGI number: AT2G28380.1 uORF ′5 STOP: 134 uORF 3′ STOP: 200 leader length: 265 |
| 1337 | AGI number: AT2G28490.1 uORF ′5 STOP: 5 uORF 3′ STOP: 116 leader length: 29 |
| 1338 | AGI number: AT2G28490.1 uORF ′5 STOP: 5 uORF 3′ STOP: 116 leader length: 29 |
| 1339 | AGI number: AT2G28550.2 uORF ′5 STOP: 138 uORF 3′ STOP: 210 leader length: 292 |
| 1340 | AGI number: AT2G28550.2 uORF ′5 STOP: 138 uORF 3′ STOP: 210 leader length: 292 |
| 1341 | AGI number: AT2G28810.2 uORF ′5 STOP: 188 uORF 3′ STOP: 287 leader length: 508 |
| 1342 | AGI number: AT2G28810.2 uORF ′5 STOP: 188 uORF 3′ STOP: 287 leader length: 508 |
| 1343 | AGI number: AT2G28810.2 uORF ′5 STOP: 131 uORF 3′ STOP: 191 leader length: 508 |
| 1344 | AGI number: AT2G28810.2 uORF ′5 STOP: 131 uORF 3′ STOP: 191 leader length: 508 |
| 1345 | AGI number: AT2G29190.1 uORF ′5 STOP: 110 uORF 3′ STOP: 242 leader length: 336 |
| 1346 | AGI number: AT2G29190.1 uORF ′5 STOP: 110 uORF 3′ STOP: 242 leader length: 336 |
| 1347 | AGI number: AT2G29190.1 uORF ′5 STOP: 196 uORF 3′ STOP: 253 leader length: 336 |
| 1348 | AGI number: AT2G29190.1 uORF ′5 STOP: 196 uORF 3′ STOP: 253 leader length: 336 |
| 1349 | AGI number: AT2G29190.2 uORF ′5 STOP: 179 uORF 3′ STOP: 311 leader length: 389 |
| 1350 | AGI number: AT2G29190.2 uORF ′5 STOP: 179 uORF 3′ STOP: 311 leader length: 389 |
| 1351 | AGI number: AT2G29290.1 uORF ′5 STOP: 22 uORF 3′ STOP: 184 leader length: 565 |
| 1352 | AGI number: AT2G29290.1 uORF ′5 STOP: 22 uORF 3′ STOP: 184 leader length: 565 |
| 1353 | AGI number: AT2G29290.2 uORF ′5 STOP: 158 uORF 3′ STOP: 230 leader length: 554 |
| 1354 | AGI number: AT2G29290.2 uORF ′5 STOP: 158 uORF 3′ STOP: 230 leader length: 554 |
| 1355 | AGI number: AT2G29290.2 uORF ′5 STOP: 22 uORF 3′ STOP: 184 leader length: 554 |
| 1356 | AGI number: AT2G29290.2 uORF ′5 STOP: 22 uORF 3′ STOP: 184 leader length: 554 |
| 1357 | AGI number: AT2G29600.1 uORF ′5 STOP: 168 uORF 3′ STOP: 270 leader length: 510 |
| 1358 | AGI number: AT2G29600.1 uORF ′5 STOP: 168 uORF 3′ STOP: 270 leader length: 510 |
| 1359 | AGI number: AT2G30370.1 uORF ′5 STOP: 238 uORF 3′ STOP: 397 leader length: 242 |
| 1360 | AGI number: AT2G30370.1 uORF ′5 STOP: 238 uORF 3′ STOP: 397 leader length: 242 |
| 1361 | AGI number: AT2G30370.2 uORF ′5 STOP: 111 uORF 3′ STOP: 210 leader length: 242 |
| 1362 | AGI number: AT2G30370.2 uORF ′5 STOP: 111 uORF 3′ STOP: 210 leader length: 242 |
| 1363 | AGI number: AT2G30520.2 uORF ′5 STOP: 12 uORF 3′ STOP: 138 leader length: 364 |
| 1364 | AGI number: AT2G30520.2 uORF ′5 STOP: 12 uORF 3′ STOP: 138 leader length: 364 |
| 1365 | AGI number: AT2G30520.2 uORF ′5 STOP: 59 uORF 3′ STOP: 173 leader length: 364 |
| 1366 | AGI number: AT2G30520.2 uORF ′5 STOP: 59 uORF 3′ STOP: 173 leader length: 364 |
| 1367 | AGI number: AT2G30590.1 uORF ′5 STOP: 4 uORF 3′ STOP: 154 leader length: 415 |
| 1368 | AGI number: AT2G30590.1 uORF ′5 STOP: 4 uORF 3′ STOP: 154 leader length: 415 |
| 1369 | AGI number: AT2G30590.1 uORF ′5 STOP: 264 uORF 3′ STOP: 318 leader length: 415 |
| 1370 | AGI number: AT2G30590.1 uORF ′5 STOP: 264 uORF 3′ STOP: 318 leader length: 415 |
| 1371 | AGI number: AT2G30590.1 uORF ′5 STOP: 169 uORF 3′ STOP: 331 leader length: 415 |
| 1372 | AGI number: AT2G30590.1 uORF ′5 STOP: 169 uORF 3′ STOP: 331 leader length: 415 |
| 1373 | AGI number: AT2G30590.1 uORF ′5 STOP: 26 uORF 3′ STOP: 143 leader length: 415 |
| 1374 | AGI number: AT2G30590.1 uORF ′5 STOP: 26 uORF 3′ STOP: 143 leader length: 415 |
| 1375 | AGI number: AT2G30600.5 uORF ′5 STOP: 77 uORF 3′ STOP: 140 leader length: 357 |
| 1376 | AGI number: AT2G30600.5 uORF ′5 STOP: 77 uORF 3′ STOP: 140 leader length: 357 |
| 1377 | AGI number: AT2G30600.5 uORF ′5 STOP: 70 uORF 3′ STOP: 133 leader length: 357 |
| 1378 | AGI number: AT2G30600.5 uORF ′5 STOP: 70 uORF 3′ STOP: 133 leader length: 357 |
| 1379 | AGI number: AT2G30942.1 uORF ′5 STOP: 40 uORF 3′ STOP: 289 leader length: 82 |
| 1380 | AGI number: AT2G30942.1 uORF ′5 STOP: 40 uORF 3′ STOP: 289 leader length: 82 |
| 1381 | AGI number: AT2G31010.1 uORF ′5 STOP: 2 uORF 3′ STOP: 182 leader length: 240 |
| 1382 | AGI number: AT2G31010.1 uORF ′5 STOP: 2 uORF 3′ STOP: 182 leader length: 240 |
| 1383 | AGI number: AT2G31010.2 uORF ′5 STOP: 140 uORF 3′ STOP: 215 leader length: 235 |
| 1384 | AGI number: AT2G31010.2 uORF ′5 STOP: 140 uORF 3′ STOP: 215 leader length: 235 |
| 1385 | AGI number: AT2G31010.2 uORF ′5 STOP: 76 uORF 3′ STOP: 196 leader length: 235 |
| 1386 | AGI number: AT2G31010.2 uORF ′5 STOP: 76 uORF 3′ STOP: 196 leader length: 235 |
| 1387 | AGI number: AT2G31070.1 uORF ′5 STOP: 264 uORF 3′ STOP: 363 leader length: 540 |
| 1388 | AGI number: AT2G31070.1 uORF ′5 STOP: 264 uORF 3′ STOP: 363 leader length: 540 |
| 1389 | AGI number: AT2G31280.1 uORF ′5 STOP: 311 uORF 3′ STOP: 449 leader length: 591 |
| 1390 | AGI number: AT2G31280.1 uORF ′5 STOP: 311 uORF 3′ STOP: 449 leader length: 591 |
| 1391 | AGI number: AT2G31280.1 uORF ′5 STOP: 370 uORF 3′ STOP: 445 leader length: 591 |
| 1392 | AGI number: AT2G31280.1 uORF ′5 STOP: 370 uORF 3′ STOP: 445 leader length: 591 |
| 1393 | AGI number: AT2G31280.3 uORF ′5 STOP: 370 uORF 3′ STOP: 445 leader length: 591 |
| 1394 | AGI number: AT2G31280.3 uORF ′5 STOP: 370 uORF 3′ STOP: 445 leader length: 591 |
| 1395 | AGI number: AT2G31280.3 uORF ′5 STOP: 311 uORF 3′ STOP: 449 leader length: 591 |
| 1396 | AGI number: AT2G31280.3 uORF ′5 STOP: 311 uORF 3′ STOP: 449 leader length: 591 |
| 1397 | AGI number: AT2G31490.1 uORF ′5 STOP: 67 uORF 3′ STOP: 340 leader length: 77 |
| 1398 | AGI number: AT2G31490.1 uORF ′5 STOP: 67 uORF 3′ STOP: 340 leader length: 77 |
| 1399 | AGI number: AT2G32190.2 uORF ′5 STOP: 24 uORF 3′ STOP: 243 leader length: 90 |
| 1400 | AGI number: AT2G32190.2 uORF ′5 STOP: 24 uORF 3′ STOP: 243 leader length: 90 |
| 1401 | AGI number: AT2G32235.1 uORF ′5 STOP: 521 uORF 3′ STOP: 584 leader length: 957 |
| 1402 | AGI number: AT2G32235.1 uORF ′5 STOP: 521 uORF 3′ STOP: 584 leader length: 957 |
| 1403 | AGI number: AT2G32235.1 uORF ′5 STOP: 581 uORF 3′ STOP: 782 leader length: 957 |
| 1404 | AGI number: AT2G32235.1 uORF ′5 STOP: 581 uORF 3′ STOP: 782 leader length: 957 |
| 1405 | AGI number: AT2G32235.1 uORF ′5 STOP: 646 uORF 3′ STOP: 787 leader length: 957 |
| 1406 | AGI number: AT2G32235.1 uORF ′5 STOP: 646 uORF 3′ STOP: 787 leader length: 957 |
| 1407 | AGI number: AT2G32250.1 uORF ′5 STOP: 376 uORF 3′ STOP: 433 leader length: 413 |
| 1408 | AGI number: AT2G32250.1 uORF ′5 STOP: 376 uORF 3′ STOP: 433 leader length: 413 |
| 1409 | AGI number: AT2G32250.2 uORF ′5 STOP: 251 uORF 3′ STOP: 305 leader length: 413 |
| 1410 | AGI number: AT2G32250.2 uORF ′5 STOP: 251 uORF 3′ STOP: 305 leader length: 413 |
| 1411 | AGI number: AT2G32250.2 uORF ′5 STOP: 240 uORF 3′ STOP: 297 leader length: 413 |
| 1412 | AGI number: AT2G32250.2 uORF ′5 STOP: 240 uORF 3′ STOP: 297 leader length: 413 |
| 1413 | AGI number: AT2G32250.4 uORF ′5 STOP: 52 uORF 3′ STOP: 133 leader length: 413 |
| 1414 | AGI number: AT2G32250.4 uORF ′5 STOP: 52 uORF 3′ STOP: 133 leader length: 413 |
| 1415 | AGI number: AT2G32320.2 uORF ′5 STOP: 93 uORF 3′ STOP: 165 leader length: 212 |
| 1416 | AGI number: AT2G32320.2 uORF ′5 STOP: 93 uORF 3′ STOP: 165 leader length: 212 |
| 1417 | AGI number: AT2G32430.1 uORF ′5 STOP: 171 uORF 3′ STOP: 246 leader length: 330 |
| 1418 | AGI number: AT2G32430.1 uORF ′5 STOP: 171 uORF 3′ STOP: 246 leader length: 330 |
| 1419 | AGI number: AT2G32440.2 uORF ′5 STOP: 81 uORF 3′ STOP: 165 leader length: 240 |
| 1420 | AGI number: AT2G32440.2 uORF ′5 STOP: 81 uORF 3′ STOP: 165 leader length: 240 |
| 1421 | AGI number: AT2G32440.2 uORF ′5 STOP: 109 uORF 3′ STOP: 160 leader length: 240 |
| 1422 | AGI number: AT2G32440.2 uORF ′5 STOP: 109 uORF 3′ STOP: 160 leader length: 240 |
| 1423 | AGI number: AT2G32890.1 uORF ′5 STOP: 751 uORF 3′ STOP: 865 leader length: 824 |
| 1424 | AGI number: AT2G32890.1 uORF ′5 STOP: 751 uORF 3′ STOP: 865 leader length: 824 |
| 1425 | AGI number: AT2G32890.1 uORF ′5 STOP: 179 uORF 3′ STOP: 356 leader length: 824 |
| 1426 | AGI number: AT2G32890.1 uORF ′5 STOP: 179 uORF 3′ STOP: 356 leader length: 824 |
| 1427 | AGI number: AT2G32890.1 uORF ′5 STOP: 198 uORF 3′ STOP: 279 leader length: 824 |
| 1428 | AGI number: AT2G32890.1 uORF ′5 STOP: 198 uORF 3′ STOP: 279 leader length: 824 |
| 1429 | AGI number: AT2G33170.1 uORF ′5 STOP: 261 uORF 3′ STOP: 315 leader length: 516 |
| 1430 | AGI number: AT2G33170.1 uORF ′5 STOP: 261 uORF 3′ STOP: 315 leader length: 516 |
| 1431 | AGI number: AT2G33170.1 uORF ′5 STOP: 55 uORF 3′ STOP: 136 leader length: 516 |
| 1432 | AGI number: AT2G33170.1 uORF ′5 STOP: 55 uORF 3′ STOP: 136 leader length: 516 |
| 1433 | AGI number: AT2G33390.1 uORF ′5 STOP: 284 uORF 3′ STOP: 338 leader length: 423 |
| 1434 | AGI number: AT2G33390.1 uORF ′5 STOP: 284 uORF 3′ STOP: 338 leader length: 423 |
| 1435 | AGI number: AT2G33700.1 uORF ′5 STOP: 78 uORF 3′ STOP: 210 leader length: 776 |
| 1436 | AGI number: AT2G33700.1 uORF ′5 STOP: 78 uORF 3′ STOP: 210 leader length: 776 |
| 1437 | AGI number: AT2G33770.1 uORF ′5 STOP: 86 uORF 3′ STOP: 275 leader length: 1152 |
| 1438 | AGI number: AT2G33770.1 uORF ′5 STOP: 86 uORF 3′ STOP: 275 leader length: 1152 |
| 1439 | AGI number: AT2G33770.1 uORF ′5 STOP: 272 uORF 3′ STOP: 329 leader length: 1152 |
| 1440 | AGI number: AT2G33770.1 uORF ′5 STOP: 272 uORF 3′ STOP: 329 leader length: 1152 |
| 1441 | AGI number: AT2G34260.2 uORF ′5 STOP: 3 uORF 3′ STOP: 231 leader length: 275 |
| 1442 | AGI number: AT2G34260.2 uORF ′5 STOP: 3 uORF 3′ STOP: 231 leader length: 275 |
| 1443 | AGI number: AT2G34660.1 uORF ′5 STOP: 134 uORF 3′ STOP: 260 leader length: 567 |
| 1444 | AGI number: AT2G34660.1 uORF ′5 STOP: 134 uORF 3′ STOP: 260 leader length: 567 |
| 1445 | AGI number: AT2G34670.1 uORF ′5 STOP: 299 uORF 3′ STOP: 395 leader length: 502 |
| 1446 | AGI number: AT2G34670.1 uORF ′5 STOP: 299 uORF 3′ STOP: 395 leader length: 502 |
| 1447 | AGI number: AT2G34670.1 uORF ′5 STOP: 202 uORF 3′ STOP: 403 leader length: 502 |
| 1448 | AGI number: AT2G34670.1 uORF ′5 STOP: 202 uORF 3′ STOP: 403 leader length: 502 |
| 1449 | AGI number: AT2G34670.1 uORF ′5 STOP: 197 uORF 3′ STOP: 266 leader length: 502 |
| 1450 | AGI number: AT2G34670.1 uORF ′5 STOP: 197 uORF 3′ STOP: 266 leader length: 502 |
| 1451 | AGI number: AT2G34670.2 uORF ′5 STOP: 361 uORF 3′ STOP: 457 leader length: 564 |
| 1452 | AGI number: AT2G34670.2 uORF ′5 STOP: 361 uORF 3′ STOP: 457 leader length: 564 |
| 1453 | AGI number: AT2G34670.2 uORF ′5 STOP: 132 uORF 3′ STOP: 267 leader length: 564 |
| 1454 | AGI number: AT2G34670.2 uORF ′5 STOP: 132 uORF 3′ STOP: 267 leader length: 564 |
| 1455 | AGI number: AT2G34670.2 uORF ′5 STOP: 264 uORF 3′ STOP: 465 leader length: 564 |
| 1456 | AGI number: AT2G34670.2 uORF ′5 STOP: 264 uORF 3′ STOP: 465 leader length: 564 |
| 1457 | AGI number: AT2G34780.2 uORF ′5 STOP: 159 uORF 3′ STOP: 240 leader length: 529 |
| 1458 | AGI number: AT2G34780.2 uORF ′5 STOP: 159 uORF 3′ STOP: 240 leader length: 529 |
| 1459 | AGI number: AT2G35155.1 uORF ′5 STOP: 46 uORF 3′ STOP: 262 leader length: 308 |
| 1460 | AGI number: AT2G35155.1 uORF ′5 STOP: 46 uORF 3′ STOP: 262 leader length: 308 |
| 1461 | AGI number: AT2G35310.1 uORF ′5 STOP: 69 uORF 3′ STOP: 189 leader length: 88 |
| 1462 | AGI number: AT2G35310.1 uORF ′5 STOP: 69 uORF 3′ STOP: 189 leader length: 88 |
| 1463 | AGI number: AT2G35390.1 uORF ′5 STOP: 243 uORF 3′ STOP: 339 leader length: 673 |
| 1464 | AGI number: AT2G35390.1 uORF ′5 STOP: 243 uORF 3′ STOP: 339 leader length: 673 |
| 1465 | AGI number: AT2G35510.1 uORF ′5 STOP: 270 uORF 3′ STOP: 330 leader length: 417 |
| 1466 | AGI number: AT2G35510.1 uORF ′5 STOP: 270 uORF 3′ STOP: 330 leader length: 417 |
| 1467 | AGI number: AT2G35510.1 uORF ′5 STOP: 251 uORF 3′ STOP: 344 leader length: 417 |
| 1468 | AGI number: AT2G35510.1 uORF ′5 STOP: 251 uORF 3′ STOP: 344 leader length: 417 |
| 1469 | AGI number: AT2G35510.1 uORF ′5 STOP: 50 uORF 3′ STOP: 122 leader length: 417 |
| 1470 | AGI number: AT2G35510.1 uORF ′5 STOP: 50 uORF 3′ STOP: 122 leader length: 417 |
| 1471 | AGI number: AT2G35600.1 uORF ′5 STOP: 90 uORF 3′ STOP: 219 leader length: 376 |
| 1472 | AGI number: AT2G35600.1 uORF ′5 STOP: 90 uORF 3′ STOP: 219 leader length: 376 |
| 1473 | AGI number: AT2G35660.3 uORF ′5 STOP: 142 uORF 3′ STOP: 310 leader length: 446 |
| 1474 | AGI number: AT2G35660.3 uORF ′5 STOP: 142 uORF 3′ STOP: 310 leader length: 446 |
| 1475 | AGI number: AT2G35680.1 uORF ′5 STOP: 173 uORF 3′ STOP: 371 leader length: 495 |
| 1476 | AGI number: AT2G35680.1 uORF ′5 STOP: 173 uORF 3′ STOP: 371 leader length: 495 |
| 1477 | AGI number: AT2G35750.1 uORF ′5 STOP: 168 uORF 3′ STOP: 219 leader length: 201 |
| 1478 | AGI number: AT2G35750.1 uORF ′5 STOP: 168 uORF 3′ STOP: 219 leader length: 201 |
| 1479 | AGI number: AT2G35750.1 uORF ′5 STOP: 179 uORF 3′ STOP: 230 leader length: 201 |
| 1480 | AGI number: AT2G35750.1 uORF ′5 STOP: 179 uORF 3′ STOP: 230 leader length: 201 |
| 1481 | AGI number: AT2G35800.1 uORF ′5 STOP: 168 uORF 3′ STOP: 222 leader length: 392 |
| 1482 | AGI number: AT2G35800.1 uORF ′5 STOP: 168 uORF 3′ STOP: 222 leader length: 392 |
| 1483 | AGI number: AT2G35800.1 uORF ′5 STOP: 1 uORF 3′ STOP: 202 leader length: 392 |
| 1484 | AGI number: AT2G35800.1 uORF ′5 STOP: 1 uORF 3′ STOP: 202 leader length: 392 |
| 1485 | AGI number: AT2G35880.1 uORF ′5 STOP: 167 uORF 3′ STOP: 227 leader length: 309 |
| 1486 | AGI number: AT2G35880.1 uORF ′5 STOP: 167 uORF 3′ STOP: 227 leader length: 309 |
| 1487 | AGI number: AT2G35880.1 uORF ′5 STOP: 159 uORF 3′ STOP: 222 leader length: 309 |
| 1488 | AGI number: AT2G35880.1 uORF ′5 STOP: 159 uORF 3′ STOP: 222 leader length: 309 |
| 1489 | AGI number: AT2G35940.3 uORF ′5 STOP: 141 uORF 3′ STOP: 195 leader length: 543 |
| 1490 | AGI number: AT2G35940.3 uORF ′5 STOP: 141 uORF 3′ STOP: 195 leader length: 543 |
| 1491 | AGI number: AT2G36210.1 uORF ′5 STOP: 32 uORF 3′ STOP: 179 leader length: 71 |
| 1492 | AGI number: AT2G36210.1 uORF ′5 STOP: 32 uORF 3′ STOP: 179 leader length: 71 |
| 1493 | AGI number: AT2G36370.1 uORF ′5 STOP: 16 uORF 3′ STOP: 133 leader length: 101 |
| 1494 | AGI number: AT2G36370.1 uORF ′5 STOP: 16 uORF 3′ STOP: 133 leader length: 101 |
| 1495 | AGI number: AT2G36460.2 uORF ′5 STOP: 295 uORF 3′ STOP: 355 leader length: 485 |
| 1496 | AGI number: AT2G36460.2 uORF ′5 STOP: 295 uORF 3′ STOP: 355 leader length: 485 |
| 1497 | AGI number: AT2G36470.1 uORF ′5 STOP: 149 uORF 3′ STOP: 305 leader length: 622 |
| 1498 | AGI number: AT2G36470.1 uORF ′5 STOP: 149 uORF 3′ STOP: 305 leader length: 622 |
| 1499 | AGI number: AT2G36485.1 uORF ′5 STOP: 36 uORF 3′ STOP: 156 leader length: 259 |
| 1500 | AGI number: AT2G36485.1 uORF ′5 STOP: 36 uORF 3′ STOP: 156 leader length: 259 |
| 1501 | AGI number: AT2G36720.1 uORF ′5 STOP: 120 uORF 3′ STOP: 180 leader length: 376 |
| 1502 | AGI number: AT2G36720.1 uORF ′5 STOP: 120 uORF 3′ STOP: 180 leader length: 376 |
| 1503 | AGI number: AT2G36720.1 uORF ′5 STOP: 133 uORF 3′ STOP: 199 leader length: 376 |
| 1504 | AGI number: AT2G36720.1 uORF ′5 STOP: 133 uORF 3′ STOP: 199 leader length: 376 |
| 1505 | AGI number: AT2G36840.1 uORF ′5 STOP: 7 uORF 3′ STOP: 85 leader length: 164 |
| 1506 | AGI number: AT2G36840.1 uORF ′5 STOP: 7 uORF 3′ STOP: 85 leader length: 164 |
| 1507 | AGI number: AT2G36960.2 uORF ′5 STOP: 185 uORF 3′ STOP: 248 leader length: 201 |
| 1508 | AGI number: AT2G36960.2 uORF ′5 STOP: 185 uORF 3′ STOP: 248 leader length: 201 |
| 1509 | AGI number: AT2G37080.1 uORF ′5 STOP: 54 uORF 3′ STOP: 138 leader length: 295 |
| 1510 | AGI number: AT2G37080.1 uORF ′5 STOP: 54 uORF 3′ STOP: 138 leader length: 295 |
| 1511 | AGI number: AT2G37080.1 uORF ′5 STOP: 68 uORF 3′ STOP: 143 leader length: 295 |
| 1512 | AGI number: AT2G37080.1 uORF ′5 STOP: 68 uORF 3′ STOP: 143 leader length: 295 |
| 1513 | AGI number: AT2G37150.2 uORF ′5 STOP: 161 uORF 3′ STOP: 230 leader length: 666 |
| 1514 | AGI number: AT2G37150.2 uORF ′5 STOP: 161 uORF 3′ STOP: 230 leader length: 666 |
| 1515 | AGI number: AT2G37150.2 uORF ′5 STOP: 230 uORF 3′ STOP: 320 leader length: 666 |
| 1516 | AGI number: AT2G37150.2 uORF ′5 STOP: 230 uORF 3′ STOP: 320 leader length: 666 |
| 1517 | AGI number: AT2G37150.2 uORF ′5 STOP: 184 uORF 3′ STOP: 259 leader length: 666 |
| 1518 | AGI number: AT2G37150.2 uORF ′5 STOP: 184 uORF 3′ STOP: 259 leader length: 666 |
| 1519 | AGI number: AT2G37150.2 uORF ′5 STOP: 526 uORF 3′ STOP: 589 leader length: 666 |
| 1520 | AGI number: AT2G37150.2 uORF ′5 STOP: 526 uORF 3′ STOP: 589 leader length: 666 |
| 1521 | AGI number: AT2G37150.2 uORF ′5 STOP: 472 uORF 3′ STOP: 529 leader length: 666 |
| 1522 | AGI number: AT2G37150.2 uORF ′5 STOP: 472 uORF 3′ STOP: 529 leader length: 666 |
| 1523 | AGI number: AT2G37160.2 uORF ′5 STOP: 19 uORF 3′ STOP: 133 leader length: 219 |
| 1524 | AGI number: AT2G37160.2 uORF ′5 STOP: 19 uORF 3′ STOP: 133 leader length: 219 |
| 1525 | AGI number: AT2G37340.2 uORF ′5 STOP: 35 uORF 3′ STOP: 251 leader length: 312 |
| 1526 | AGI number: AT2G37340.2 uORF ′5 STOP: 35 uORF 3′ STOP: 251 leader length: 312 |
| 1527 | AGI number: AT2G37340.2 uORF ′5 STOP: 78 uORF 3′ STOP: 210 leader length: 312 |
| 1528 | AGI number: AT2G37340.2 uORF ′5 STOP: 78 uORF 3′ STOP: 210 leader length: 312 |
| 1529 | AGI number: AT2G37340.2 uORF ′5 STOP: 175 uORF 3′ STOP: 238 leader length: 312 |
| 1530 | AGI number: AT2G37340.2 uORF ′5 STOP: 175 uORF 3′ STOP: 238 leader length: 312 |
| 1531 | AGI number: AT2G37340.3 uORF ′5 STOP: 97 uORF 3′ STOP: 151 leader length: 423 |
| 1532 | AGI number: AT2G37340.3 uORF ′5 STOP: 97 uORF 3′ STOP: 151 leader length: 423 |
| 1533 | AGI number: AT2G37340.3 uORF ′5 STOP: 78 uORF 3′ STOP: 210 leader length: 423 |
| 1534 | AGI number: AT2G37340.3 uORF ′5 STOP: 78 uORF 3′ STOP: 210 leader length: 423 |
| 1535 | AGI number: AT2G37480.1 uORF ′5 STOP: 268 uORF 3′ STOP: 430 leader length: 601 |
| 1536 | AGI number: AT2G37480.1 uORF ′5 STOP: 268 uORF 3′ STOP: 430 leader length: 601 |
| 1537 | AGI number: AT2G37480.2 uORF ′5 STOP: 268 uORF 3′ STOP: 430 leader length: 601 |
| 1538 | AGI number: AT2G37480.2 uORF ′5 STOP: 268 uORF 3′ STOP: 430 leader length: 601 |
| 1539 | AGI number: AT2G37570.1 uORF ′5 STOP: 57 uORF 3′ STOP: 120 leader length: 423 |
| 1540 | AGI number: AT2G37570.1 uORF ′5 STOP: 57 uORF 3′ STOP: 120 leader length: 423 |
| 1541 | AGI number: AT2G37570.2 uORF ′5 STOP: 67 uORF 3′ STOP: 130 leader length: 435 |
| 1542 | AGI number: AT2G37570.2 uORF ′5 STOP: 67 uORF 3′ STOP: 130 leader length: 435 |
| 1543 | AGI number: AT2G37840.2 uORF ′5 STOP: 800 uORF 3′ STOP: 857 leader length: 871 |
| 1544 | AGI number: AT2G37840.2 uORF ′5 STOP: 800 uORF 3′ STOP: 857 leader length: 871 |
| 1545 | AGI number: AT2G37840.2 uORF ′5 STOP: 724 uORF 3′ STOP: 871 leader length: 871 |
| 1546 | AGI number: AT2G37840.2 uORF ′5 STOP: 724 uORF 3′ STOP: 871 leader length: 871 |
| 1547 | AGI number: AT2G37890.1 uORF ′5 STOP: 96 uORF 3′ STOP: 165 leader length: 160 |
| 1548 | AGI number: AT2G37890.1 uORF ′5 STOP: 96 uORF 3′ STOP: 165 leader length: 160 |
| 1549 | AGI number: AT2G38040.2 uORF ′5 STOP: 28 uORF 3′ STOP: 175 leader length: 291 |
| 1550 | AGI number: AT2G38040.2 uORF ′5 STOP: 28 uORF 3′ STOP: 175 leader length: 291 |
| 1551 | AGI number: AT2G38290.2 uORF ′5 STOP: 131 uORF 3′ STOP: 392 leader length: 519 |
| 1552 | AGI number: AT2G38290.2 uORF ′5 STOP: 131 uORF 3′ STOP: 392 leader length: 519 |
| 1553 | AGI number: AT2G38290.2 uORF ′5 STOP: 250 uORF 3′ STOP: 412 leader length: 519 |
| 1554 | AGI number: AT2G38290.2 uORF ′5 STOP: 250 uORF 3′ STOP: 412 leader length: 519 |
| 1555 | AGI number: AT2G38820.1 uORF ′5 STOP: 122 uORF 3′ STOP: 179 leader length: 368 |
| 1556 | AGI number: AT2G38820.1 uORF ′5 STOP: 122 uORF 3′ STOP: 179 leader length: 368 |
| 1557 | AGI number: AT2G38820.1 uORF ′5 STOP: 130 uORF 3′ STOP: 187 leader length: 368 |
| 1558 | AGI number: AT2G38820.1 uORF ′5 STOP: 130 uORF 3′ STOP: 187 leader length: 368 |
| 1559 | AGI number: AT2G38820.1 uORF ′5 STOP: 108 uORF 3′ STOP: 168 leader length: 368 |
| 1560 | AGI number: AT2G38820.1 uORF ′5 STOP: 108 uORF 3′ STOP: 168 leader length: 368 |
| 1561 | AGI number: AT2G38820.1 uORF ′5 STOP: 68 uORF 3′ STOP: 125 leader length: 368 |
| 1562 | AGI number: AT2G38820.1 uORF ′5 STOP: 68 uORF 3′ STOP: 125 leader length: 368 |
| 1563 | AGI number: AT2G38820.2 uORF ′5 STOP: 135 uORF 3′ STOP: 192 leader length: 435 |
| 1564 | AGI number: AT2G38820.2 uORF ′5 STOP: 135 uORF 3′ STOP: 192 leader length: 435 |
| 1565 | AGI number: AT2G38820.2 uORF ′5 STOP: 103 uORF 3′ STOP: 163 leader length: 435 |
| 1566 | AGI number: AT2G38820.2 uORF ′5 STOP: 103 uORF 3′ STOP: 163 leader length: 435 |
| 1567 | AGI number: AT2G39280.2 uORF ′5 STOP: 99 uORF 3′ STOP: 228 leader length: 204 |
| 1568 | AGI number: AT2G39280.2 uORF ′5 STOP: 99 uORF 3′ STOP: 228 leader length: 204 |
| 1569 | AGI number: AT2G39970.1 uORF ′5 STOP: 55 uORF 3′ STOP: 139 leader length: 225 |
| 1570 | AGI number: AT2G39970.1 uORF ′5 STOP: 55 uORF 3′ STOP: 139 leader length: 225 |
| 1571 | AGI number: AT2G40120.1 uORF ′5 STOP: 187 uORF 3′ STOP: 253 leader length: 334 |
| 1572 | AGI number: AT2G40120.1 uORF ′5 STOP: 187 uORF 3′ STOP: 253 leader length: 334 |
| 1573 | AGI number: AT2G40460.1 uORF ′5 STOP: 24 uORF 3′ STOP: 87 leader length: 216 |
| 1574 | AGI number: AT2G40460.1 uORF ′5 STOP: 24 uORF 3′ STOP: 87 leader length: 216 |
| 1575 | AGI number: AT2G41100.3 uORF ′5 STOP: 70 uORF 3′ STOP: 127 leader length: 257 |
| 1576 | AGI number: AT2G41100.3 uORF ′5 STOP: 70 uORF 3′ STOP: 127 leader length: 257 |
| 1577 | AGI number: AT2G41430.1 uORF ′5 STOP: 106 uORF 3′ STOP: 184 leader length: 275 |
| 1578 | AGI number: AT2G41430.1 uORF ′5 STOP: 106 uORF 3′ STOP: 184 leader length: 275 |
| 1579 | AGI number: AT2G41430.4 uORF ′5 STOP: 220 uORF 3′ STOP: 277 leader length: 504 |
| 1580 | AGI number: AT2G41430.4 uORF ′5 STOP: 220 uORF 3′ STOP: 277 leader length: 504 |
| 1581 | AGI number: AT2G41430.4 uORF ′5 STOP: 106 uORF 3′ STOP: 184 leader length: 504 |
| 1582 | AGI number: AT2G41430.4 uORF ′5 STOP: 106 uORF 3′ STOP: 184 leader length: 504 |
| 1583 | AGI number: AT2G41430.5 uORF ′5 STOP: 106 uORF 3′ STOP: 184 leader length: 294 |
| 1584 | AGI number: AT2G41430.5 uORF ′5 STOP: 106 uORF 3′ STOP: 184 leader length: 294 |
| 1585 | AGI number: AT2G41440.1 uORF ′5 STOP: 7 uORF 3′ STOP: 85 leader length: 534 |
| 1586 | AGI number: AT2G41440.1 uORF ′5 STOP: 7 uORF 3′ STOP: 85 leader length: 534 |
| 1587 | AGI number: AT2G41710.3 uORF ′5 STOP: 29 uORF 3′ STOP: 413 leader length: 147 |
| 1588 | AGI number: AT2G41710.3 uORF ′5 STOP: 29 uORF 3′ STOP: 413 leader length: 147 |
| 1589 | AGI number: AT2G41830.1 uORF ′5 STOP: 73 uORF 3′ STOP: 142 leader length: 430 |
| 1590 | AGI number: AT2G41830.1 uORF ′5 STOP: 73 uORF 3′ STOP: 142 leader length: 430 |
| 1591 | AGI number: AT2G42030.1 uORF ′5 STOP: 7 uORF 3′ STOP: 187 leader length: 375 |
| 1592 | AGI number: AT2G42030.1 uORF ′5 STOP: 7 uORF 3′ STOP: 187 leader length: 375 |
| 1593 | AGI number: AT2G42030.1 uORF ′5 STOP: 86 uORF 3′ STOP: 167 leader length: 375 |
| 1594 | AGI number: AT2G42030.1 uORF ′5 STOP: 86 uORF 3′ STOP: 167 leader length: 375 |
| 1595 | AGI number: AT2G42300.1 uORF ′5 STOP: 29 uORF 3′ STOP: 101 leader length: 386 |
| 1596 | AGI number: AT2G42300.1 uORF ′5 STOP: 29 uORF 3′ STOP: 101 leader length: 386 |
| 1597 | AGI number: AT2G42300.1 uORF ′5 STOP: 9 uORF 3′ STOP: 90 leader length: 386 |
| 1598 | AGI number: AT2G42300.1 uORF ′5 STOP: 9 uORF 3′ STOP: 90 leader length: 386 |
| 1599 | AGI number: AT2G42300.2 uORF ′5 STOP: 28 uORF 3′ STOP: 100 leader length: 385 |
| 1600 | AGI number: AT2G42300.2 uORF ′5 STOP: 28 uORF 3′ STOP: 100 leader length: 385 |
| 1601 | AGI number: AT2G42300.2 uORF ′5 STOP: 8 uORF 3′ STOP: 89 leader length: 385 |
| 1602 | AGI number: AT2G42300.2 uORF ′5 STOP: 8 uORF 3′ STOP: 89 leader length: 385 |
| 1603 | AGI number: AT2G42320.2 uORF ′5 STOP: 79 uORF 3′ STOP: 217 leader length: 346 |
| 1604 | AGI number: AT2G42320.2 uORF ′5 STOP: 79 uORF 3′ STOP: 217 leader length: 346 |
| 1605 | AGI number: AT2G42380.1 uORF ′5 STOP: 83 uORF 3′ STOP: 173 leader length: 285 |
| 1606 | AGI number: AT2G42380.1 uORF ′5 STOP: 83 uORF 3′ STOP: 173 leader length: 285 |
| 1607 | AGI number: AT2G42380.1 uORF ′5 STOP: 138 uORF 3′ STOP: 192 leader length: 285 |
| 1608 | AGI number: AT2G42380.1 uORF ′5 STOP: 138 uORF 3′ STOP: 192 leader length: 285 |
| 1609 | AGI number: AT2G42380.2 uORF ′5 STOP: 83 uORF 3′ STOP: 173 leader length: 285 |
| 1610 | AGI number: AT2G42380.2 uORF ′5 STOP: 83 uORF 3′ STOP: 173 leader length: 285 |
| 1611 | AGI number: AT2G42880.1 uORF ′5 STOP: 225 uORF 3′ STOP: 342 leader length: 433 |
| 1612 | AGI number: AT2G42880.1 uORF ′5 STOP: 225 uORF 3′ STOP: 342 leader length: 433 |
| 1613 | AGI number: AT2G43320.1 uORF ′5 STOP: 41 uORF 3′ STOP: 155 leader length: 311 |
| 1614 | AGI number: AT2G43320.1 uORF ′5 STOP: 41 uORF 3′ STOP: 155 leader length: 311 |
| 1615 | AGI number: AT2G43430.2 uORF ′5 STOP: 160 uORF 3′ STOP: 253 leader length: 624 |
| 1616 | AGI number: AT2G43430.2 uORF ′5 STOP: 160 uORF 3′ STOP: 253 leader length: 624 |
| 1617 | AGI number: AT2G43430.2 uORF ′5 STOP: 185 uORF 3′ STOP: 260 leader length: 624 |
| 1618 | AGI number: AT2G43430.2 uORF ′5 STOP: 185 uORF 3′ STOP: 260 leader length: 624 |
| 1619 | AGI number: AT2G43745.1 uORF ′5 STOP: 129 uORF 3′ STOP: 252 leader length: 624 |
| 1620 | AGI number: AT2G43745.1 uORF ′5 STOP: 129 uORF 3′ STOP: 252 leader length: 624 |
| 1621 | AGI number: AT2G43745.1 uORF ′5 STOP: 121 uORF 3′ STOP: 283 leader length: 624 |
| 1622 | AGI number: AT2G43745.1 uORF ′5 STOP: 121 uORF 3′ STOP: 283 leader length: 624 |
| 1623 | AGI number: AT2G43745.1 uORF ′5 STOP: 89 uORF 3′ STOP: 239 leader length: 624 |
| 1624 | AGI number: AT2G43745.1 uORF ′5 STOP: 89 uORF 3′ STOP: 239 leader length: 624 |
| 1625 | AGI number: AT2G44090.1 uORF ′5 STOP: 57 uORF 3′ STOP: 198 leader length: 465 |
| 1626 | AGI number: AT2G44090.1 uORF ′5 STOP: 57 uORF 3′ STOP: 198 leader length: 465 |
| 1627 | AGI number: AT2G44090.2 uORF ′5 STOP: 10 uORF 3′ STOP: 112 leader length: 365 |
| 1628 | AGI number: AT2G44090.2 uORF ′5 STOP: 10 uORF 3′ STOP: 112 leader length: 365 |
| 1629 | AGI number: AT2G44270.2 uORF ′5 STOP: 105 uORF 3′ STOP: 204 leader length: 120 |
| 1630 | AGI number: AT2G44270.2 uORF ′5 STOP: 105 uORF 3′ STOP: 204 leader length: 120 |
| 1631 | AGI number: AT2G44410.1 uORF ′5 STOP: 69 uORF 3′ STOP: 222 leader length: 310 |
| 1632 | AGI number: AT2G44410.1 uORF ′5 STOP: 69 uORF 3′ STOP: 222 leader length: 310 |
| 1633 | AGI number: AT2G44410.1 uORF ′5 STOP: 142 uORF 3′ STOP: 229 leader length: 310 |
| 1634 | AGI number: AT2G44410.1 uORF ′5 STOP: 142 uORF 3′ STOP: 229 leader length: 310 |
| 1635 | AGI number: AT2G44650.1 uORF ′5 STOP: 183 uORF 3′ STOP: 291 leader length: 600 |
| 1636 | AGI number: AT2G44650.1 uORF ′5 STOP: 183 uORF 3′ STOP: 291 leader length: 600 |
| 1637 | AGI number: AT2G44650.1 uORF ′5 STOP: 209 uORF 3′ STOP: 275 leader length: 600 |
| 1638 | AGI number: AT2G44650.1 uORF ′5 STOP: 209 uORF 3′ STOP: 275 leader length: 600 |
| 1639 | AGI number: AT2G44670.1 uORF ′5 STOP: 89 uORF 3′ STOP: 434 leader length: 99 |
| 1640 | AGI number: AT2G44670.1 uORF ′5 STOP: 89 uORF 3′ STOP: 434 leader length: 99 |
| 1641 | AGI number: AT2G44850.2 uORF ′5 STOP: 255 uORF 3′ STOP: 399 leader length: 441 |
| 1642 | AGI number: AT2G44850.2 uORF ′5 STOP: 255 uORF 3′ STOP: 399 leader length: 441 |
| 1643 | AGI number: AT2G44850.2 uORF ′5 STOP: 271 uORF 3′ STOP: 328 leader length: 441 |
| 1644 | AGI number: AT2G44850.2 uORF ′5 STOP: 271 uORF 3′ STOP: 328 leader length: 441 |
| 1645 | AGI number: AT2G44900.1 uORF ′5 STOP: 290 uORF 3′ STOP: 419 leader length: 534 |
| 1646 | AGI number: AT2G44900.1 uORF ′5 STOP: 290 uORF 3′ STOP: 419 leader length: 534 |
| 1647 | AGI number: AT2G45010.2 uORF ′5 STOP: 111 uORF 3′ STOP: 243 leader length: 859 |
| 1648 | AGI number: AT2G45010.2 uORF ′5 STOP: 111 uORF 3′ STOP: 243 leader length: 859 |
| 1649 | AGI number: AT2G45380.2 uORF ′5 STOP: 574 uORF 3′ STOP: 628 leader length: 1339 |
| 1650 | AGI number: AT2G45380.2 uORF ′5 STOP: 574 uORF 3′ STOP: 628 leader length: 1339 |
| 1651 | AGI number: AT2G45380.2 uORF ′5 STOP: 218 uORF 3′ STOP: 272 leader length: 1339 |
| 1652 | AGI number: AT2G45380.2 uORF ′5 STOP: 218 uORF 3′ STOP: 272 leader length: 1339 |
| 1653 | AGI number: AT2G45380.2 uORF ′5 STOP: 710 uORF 3′ STOP: 815 leader length: 1339 |
| 1654 | AGI number: AT2G45380.2 uORF ′5 STOP: 710 uORF 3′ STOP: 815 leader length: 1339 |
| 1655 | AGI number: AT2G45380.2 uORF ′5 STOP: 943 uORF 3′ STOP: 1315 leader length: 1339 |
| 1656 | AGI number: AT2G45380.2 uORF ′5 STOP: 943 uORF 3′ STOP: 1315 leader length: 1339 |
| 1657 | AGI number: AT2G45460.2 uORF ′5 STOP: 150 uORF 3′ STOP: 201 leader length: 151 |
| 1658 | AGI number: AT2G45460.2 uORF ′5 STOP: 150 uORF 3′ STOP: 201 leader length: 151 |
| 1659 | AGI number: AT2G45600.1 uORF ′5 STOP: 7 uORF 3′ STOP: 88 leader length: 211 |
| 1660 | AGI number: AT2G45600.1 uORF ′5 STOP: 7 uORF 3′ STOP: 88 leader length: 211 |
| 1661 | AGI number: AT2G45600.1 uORF ′5 STOP: 12 uORF 3′ STOP: 84 leader length: 211 |
| 1662 | AGI number: AT2G45600.1 uORF ′5 STOP: 12 uORF 3′ STOP: 84 leader length: 211 |
| 1663 | AGI number: AT2G45850.1 uORF ′5 STOP: 191 uORF 3′ STOP: 293 leader length: 417 |
| 1664 | AGI number: AT2G45850.1 uORF ′5 STOP: 191 uORF 3′ STOP: 293 leader length: 417 |
| 1665 | AGI number: AT2G45850.1 uORF ′5 STOP: 259 uORF 3′ STOP: 313 leader length: 417 |
| 1666 | AGI number: AT2G45850.1 uORF ′5 STOP: 259 uORF 3′ STOP: 313 leader length: 417 |
| 1667 | AGI number: AT2G46210.1 uORF ′5 STOP: 168 uORF 3′ STOP: 291 leader length: 198 |
| 1668 | AGI number: AT2G46210.1 uORF ′5 STOP: 168 uORF 3′ STOP: 291 leader length: 198 |
| 1669 | AGI number: AT2G46500.2 uORF ′5 STOP: 41 uORF 3′ STOP: 221 leader length: 305 |
| 1670 | AGI number: AT2G46500.2 uORF ′5 STOP: 41 uORF 3′ STOP: 221 leader length: 305 |
| 1671 | AGI number: AT2G46500.2 uORF ′5 STOP: 82 uORF 3′ STOP: 187 leader length: 305 |
| 1672 | AGI number: AT2G46500.2 uORF ′5 STOP: 82 uORF 3′ STOP: 187 leader length: 305 |
| 1673 | AGI number: AT2G46590.1 uORF ′5 STOP: 294 uORF 3′ STOP: 384 leader length: 603 |
| 1674 | AGI number: AT2G46590.1 uORF ′5 STOP: 294 uORF 3′ STOP: 384 leader length: 603 |
| 1675 | AGI number: AT2G46590.1 uORF ′5 STOP: 373 uORF 3′ STOP: 433 leader length: 603 |
| 1676 | AGI number: AT2G46590.1 uORF ′5 STOP: 373 uORF 3′ STOP: 433 leader length: 603 |
| 1677 | AGI number: AT2G46830.1 uORF ′5 STOP: 61 uORF 3′ STOP: 169 leader length: 249 |
| 1678 | AGI number: AT2G46830.1 uORF ′5 STOP: 61 uORF 3′ STOP: 169 leader length: 249 |
| 1679 | AGI number: AT2G47020.2 uORF ′5 STOP: 150 uORF 3′ STOP: 222 leader length: 311 |
| 1680 | AGI number: AT2G47020.2 uORF ′5 STOP: 150 uORF 3′ STOP: 222 leader length: 311 |
| 1681 | AGI number: AT2G47160.1 uORF ′5 STOP: 207 uORF 3′ STOP: 261 leader length: 356 |
| 1682 | AGI number: AT2G47160.1 uORF ′5 STOP: 207 uORF 3′ STOP: 261 leader length: 356 |
| 1683 | AGI number: AT2G47160.1 uORF ′5 STOP: 233 uORF 3′ STOP: 284 leader length: 356 |
| 1684 | AGI number: AT2G47160.1 uORF ′5 STOP: 233 uORF 3′ STOP: 284 leader length: 356 |
| 1685 | AGI number: AT2G47160.2 uORF ′5 STOP: 211 uORF 3′ STOP: 265 leader length: 360 |
| 1686 | AGI number: AT2G47160.2 uORF ′5 STOP: 211 uORF 3′ STOP: 265 leader length: 360 |
| 1687 | AGI number: AT2G47160.2 uORF ′5 STOP: 237 uORF 3′ STOP: 288 leader length: 360 |
| 1688 | AGI number: AT2G47160.2 uORF ′5 STOP: 237 uORF 3′ STOP: 288 leader length: 360 |
| 1689 | AGI number: AT2G47410.2 uORF ′5 STOP: 35 uORF 3′ STOP: 368 leader length: 552 |
| 1690 | AGI number: AT2G47410.2 uORF ′5 STOP: 35 uORF 3′ STOP: 368 leader length: 552 |
| 1691 | AGI number: AT2G47490.1 uORF ′5 STOP: 66 uORF 3′ STOP: 315 leader length: 303 |
| 1692 | AGI number: AT2G47490.1 uORF ′5 STOP: 66 uORF 3′ STOP: 315 leader length: 303 |
| 1693 | AGI number: AT2G47850.2 uORF ′5 STOP: 19 uORF 3′ STOP: 181 leader length: 280 |
| 1694 | AGI number: AT2G47850.2 uORF ′5 STOP: 19 uORF 3′ STOP: 181 leader length: 280 |
| 1695 | AGI number: AT2G47900.1 uORF ′5 STOP: 34 uORF 3′ STOP: 145 leader length: 454 |
| 1696 | AGI number: AT2G47900.1 uORF ′5 STOP: 34 uORF 3′ STOP: 145 leader length: 454 |
| 1697 | AGI number: AT2G47900.3 uORF ′5 STOP: 46 uORF 3′ STOP: 157 leader length: 466 |
| 1698 | AGI number: AT2G47900.3 uORF ′5 STOP: 46 uORF 3′ STOP: 157 leader length: 466 |
| 1699 | AGI number: AT2G47930.1 uORF ′5 STOP: 48 uORF 3′ STOP: 444 leader length: 52 |
| 1700 | AGI number: AT2G47930.1 uORF ′5 STOP: 48 uORF 3′ STOP: 444 leader length: 52 |
| 1701 | AGI number: AT3G01090.1 uORF ′5 STOP: 20 uORF 3′ STOP: 71 leader length: 198 |
| 1702 | AGI number: AT3G01090.1 uORF ′5 STOP: 20 uORF 3′ STOP: 71 leader length: 198 |
| 1703 | AGI number: AT3G01130.1 uORF ′5 STOP: 50 uORF 3′ STOP: 206 leader length: 68 |
| 1704 | AGI number: AT3G01130.1 uORF ′5 STOP: 50 uORF 3′ STOP: 206 leader length: 68 |
| 1705 | AGI number: AT3G01170.1 uORF ′5 STOP: 40 uORF 3′ STOP: 106 leader length: 402 |
| 1706 | AGI number: AT3G01170.1 uORF ′5 STOP: 40 uORF 3′ STOP: 106 leader length: 402 |
| 1707 | AGI number: AT3G01170.1 uORF ′5 STOP: 62 uORF 3′ STOP: 305 leader length: 402 |
| 1708 | AGI number: AT3G01170.1 uORF ′5 STOP: 62 uORF 3′ STOP: 305 leader length: 402 |
| 1709 | AGI number: AT3G01470.1 uORF ′5 STOP: 105 uORF 3′ STOP: 234 leader length: 369 |
| 1710 | AGI number: AT3G01470.1 uORF ′5 STOP: 105 uORF 3′ STOP: 234 leader length: 369 |
| 1711 | AGI number: AT3G01470.1 uORF ′5 STOP: 151 uORF 3′ STOP: 250 leader length: 369 |
| 1712 | AGI number: AT3G01470.1 uORF ′5 STOP: 151 uORF 3′ STOP: 250 leader length: 369 |
| 1713 | AGI number: AT3G01470.1 uORF ′5 STOP: 161 uORF 3′ STOP: 242 leader length: 369 |
| 1714 | AGI number: AT3G01470.1 uORF ′5 STOP: 161 uORF 3′ STOP: 242 leader length: 369 |
| 1715 | AGI number: AT3G01472.1 uORF ′5 STOP: 105 uORF 3′ STOP: 234 leader length: 162 |
| 1716 | AGI number: AT3G01472.1 uORF ′5 STOP: 105 uORF 3′ STOP: 234 leader length: 162 |
| 1717 | AGI number: AT3G01472.1 uORF ′5 STOP: 161 uORF 3′ STOP: 242 leader length: 162 |
| 1718 | AGI number: AT3G01472.1 uORF ′5 STOP: 161 uORF 3′ STOP: 242 leader length: 162 |
| 1719 | AGI number: AT3G01810.3 uORF ′5 STOP: 59 uORF 3′ STOP: 134 leader length: 448 |
| 1720 | AGI number: AT3G01810.3 uORF ′5 STOP: 59 uORF 3′ STOP: 134 leader length: 448 |
| 1721 | AGI number: AT3G01980.1 uORF ′5 STOP: 24 uORF 3′ STOP: 78 leader length: 198 |
| 1722 | AGI number: AT3G01980.1 uORF ′5 STOP: 24 uORF 3′ STOP: 78 leader length: 198 |
| 1723 | AGI number: AT3G02065.1 uORF ′5 STOP: 70 uORF 3′ STOP: 187 leader length: 677 |
| 1724 | AGI number: AT3G02065.1 uORF ′5 STOP: 70 uORF 3′ STOP: 187 leader length: 677 |
| 1725 | AGI number: AT3G02065.1 uORF ′5 STOP: 187 uORF 3′ STOP: 238 leader length: 677 |
| 1726 | AGI number: AT3G02065.1 uORF ′5 STOP: 187 uORF 3′ STOP: 238 leader length: 677 |
| 1727 | AGI number: AT3G02470.1 uORF ′5 STOP: 13 uORF 3′ STOP: 103 leader length: 614 |
| 1728 | AGI number: AT3G02470.1 uORF ′5 STOP: 13 uORF 3′ STOP: 103 leader length: 614 |
| 1729 | AGI number: AT3G02470.1 uORF ′5 STOP: 382 uORF 3′ STOP: 487 leader length: 614 |
| 1730 | AGI number: AT3G02470.1 uORF ′5 STOP: 382 uORF 3′ STOP: 487 leader length: 614 |
| 1731 | AGI number: AT3G02470.1 uORF ′5 STOP: 245 uORF 3′ STOP: 461 leader length: 614 |
| 1732 | AGI number: AT3G02470.1 uORF ′5 STOP: 245 uORF 3′ STOP: 461 leader length: 614 |
| 1733 | AGI number: AT3G02470.1 uORF ′5 STOP: 32 uORF 3′ STOP: 110 leader length: 614 |
| 1734 | AGI number: AT3G02470.1 uORF ′5 STOP: 32 uORF 3′ STOP: 110 leader length: 614 |
| 1735 | AGI number: AT3G02470.1 uORF ′5 STOP: 303 uORF 3′ STOP: 492 leader length: 614 |
| 1736 | AGI number: AT3G02470.1 uORF ′5 STOP: 303 uORF 3′ STOP: 492 leader length: 614 |
| 1737 | AGI number: AT3G02470.3 uORF ′5 STOP: 163 uORF 3′ STOP: 379 leader length: 532 |
| 1738 | AGI number: AT3G02470.3 uORF ′5 STOP: 163 uORF 3′ STOP: 379 leader length: 532 |
| 1739 | AGI number: AT3G02470.3 uORF ′5 STOP: 221 uORF 3′ STOP: 410 leader length: 532 |
| 1740 | AGI number: AT3G02470.3 uORF ′5 STOP: 221 uORF 3′ STOP: 410 leader length: 532 |
| 1741 | AGI number: AT3G02470.3 uORF ′5 STOP: 300 uORF 3′ STOP: 405 leader length: 532 |
| 1742 | AGI number: AT3G02470.3 uORF ′5 STOP: 300 uORF 3′ STOP: 405 leader length: 532 |
| 1743 | AGI number: AT3G02470.4 uORF ′5 STOP: 225 uORF 3′ STOP: 441 leader length: 594 |
| 1744 | AGI number: AT3G02470.4 uORF ′5 STOP: 225 uORF 3′ STOP: 441 leader length: 594 |
| 1745 | AGI number: AT3G02470.4 uORF ′5 STOP: 283 uORF 3′ STOP: 472 leader length: 594 |
| 1746 | AGI number: AT3G02470.4 uORF ′5 STOP: 283 uORF 3′ STOP: 472 leader length: 594 |
| 1747 | AGI number: AT3G02470.4 uORF ′5 STOP: 362 uORF 3′ STOP: 467 leader length: 594 |
| 1748 | AGI number: AT3G02470.4 uORF ′5 STOP: 362 uORF 3′ STOP: 467 leader length: 594 |
| 1749 | AGI number: AT3G02750.1 uORF ′5 STOP: 593 uORF 3′ STOP: 656 leader length: 943 |
| 1750 | AGI number: AT3G02750.1 uORF ′5 STOP: 593 uORF 3′ STOP: 656 leader length: 943 |
| 1751 | AGI number: AT3G02750.1 uORF ′5 STOP: 477 uORF 3′ STOP: 648 leader length: 943 |
| 1752 | AGI number: AT3G02750.1 uORF ′5 STOP: 477 uORF 3′ STOP: 648 leader length: 943 |
| 1753 | AGI number: AT3G02750.1 uORF ′5 STOP: 645 uORF 3′ STOP: 705 leader length: 943 |
| 1754 | AGI number: AT3G02750.1 uORF ′5 STOP: 645 uORF 3′ STOP: 705 leader length: 943 |
| 1755 | AGI number: AT3G02750.1 uORF ′5 STOP: 607 uORF 3′ STOP: 688 leader length: 943 |
| 1756 | AGI number: AT3G02750.1 uORF ′5 STOP: 607 uORF 3′ STOP: 688 leader length: 943 |
| 1757 | AGI number: AT3G03300.3 uORF ′5 STOP: 80 uORF 3′ STOP: 161 leader length: 319 |
| 1758 | AGI number: AT3G03300.3 uORF ′5 STOP: 80 uORF 3′ STOP: 161 leader length: 319 |
| 1759 | AGI number: AT3G03300.3 uORF ′5 STOP: 111 uORF 3′ STOP: 165 leader length: 319 |
| 1760 | AGI number: AT3G03300.3 uORF ′5 STOP: 111 uORF 3′ STOP: 165 leader length: 319 |
| 1761 | AGI number: AT3G03890.1 uORF ′5 STOP: 86 uORF 3′ STOP: 212 leader length: 488 |
| 1762 | AGI number: AT3G03890.1 uORF ′5 STOP: 86 uORF 3′ STOP: 212 leader length: 488 |
| 1763 | AGI number: AT3G03970.3 uORF ′5 STOP: 391 uORF 3′ STOP: 457 leader length: 714 |
| 1764 | AGI number: AT3G03970.3 uORF ′5 STOP: 391 uORF 3′ STOP: 457 leader length: 714 |
| 1765 | AGI number: AT3G04450.2 uORF ′5 STOP: 70 uORF 3′ STOP: 262 leader length: 558 |
| 1766 | AGI number: AT3G04450.2 uORF ′5 STOP: 70 uORF 3′ STOP: 262 leader length: 558 |
| 1767 | AGI number: AT3G04580.1 uORF ′5 STOP: 96 uORF 3′ STOP: 168 leader length: 510 |
| 1768 | AGI number: AT3G04580.1 uORF ′5 STOP: 96 uORF 3′ STOP: 168 leader length: 510 |
| 1769 | AGI number: AT3G04670.1 uORF ′5 STOP: 323 uORF 3′ STOP: 404 leader length: 596 |
| 1770 | AGI number: AT3G04670.1 uORF ′5 STOP: 323 uORF 3′ STOP: 404 leader length: 596 |
| 1771 | AGI number: AT3G04670.2 uORF ′5 STOP: 196 uORF 3′ STOP: 247 leader length: 659 |
| 1772 | AGI number: AT3G04670.2 uORF ′5 STOP: 196 uORF 3′ STOP: 247 leader length: 659 |
| 1773 | AGI number: AT3G04670.2 uORF ′5 STOP: 386 uORF 3′ STOP: 467 leader length: 659 |
| 1774 | AGI number: AT3G04670.2 uORF ′5 STOP: 386 uORF 3′ STOP: 467 leader length: 659 |
| 1775 | AGI number: AT3G04810.1 uORF ′5 STOP: 62 uORF 3′ STOP: 155 leader length: 240 |
| 1776 | AGI number: AT3G04810.1 uORF ′5 STOP: 62 uORF 3′ STOP: 155 leader length: 240 |
| 1777 | AGI number: AT3G04910.1 uORF ′5 STOP: 201 uORF 3′ STOP: 255 leader length: 449 |
| 1778 | AGI number: AT3G04910.1 uORF ′5 STOP: 201 uORF 3′ STOP: 255 leader length: 449 |
| 1779 | AGI number: AT3G04910.2 uORF ′5 STOP: 201 uORF 3′ STOP: 255 leader length: 516 |
| 1780 | AGI number: AT3G04910.2 uORF ′5 STOP: 201 uORF 3′ STOP: 255 leader length: 516 |
| 1781 | AGI number: AT3G04910.3 uORF ′5 STOP: 599 uORF 3′ STOP: 680 leader length: 798 |
| 1782 | AGI number: AT3G04910.3 uORF ′5 STOP: 599 uORF 3′ STOP: 680 leader length: 798 |
| 1783 | AGI number: AT3G04910.3 uORF ′5 STOP: 94 uORF 3′ STOP: 148 leader length: 798 |
| 1784 | AGI number: AT3G04910.3 uORF ′5 STOP: 94 uORF 3′ STOP: 148 leader length: 798 |
| 1785 | AGI number: AT3G04910.3 uORF ′5 STOP: 196 uORF 3′ STOP: 688 leader length: 798 |
| 1786 | AGI number: AT3G04910.3 uORF ′5 STOP: 196 uORF 3′ STOP: 688 leader length: 798 |
| 1787 | AGI number: AT3G04910.3 uORF ′5 STOP: 588 uORF 3′ STOP: 657 leader length: 798 |
| 1788 | AGI number: AT3G04910.3 uORF ′5 STOP: 588 uORF 3′ STOP: 657 leader length: 798 |
| 1789 | AGI number: AT3G05030.1 uORF ′5 STOP: 211 uORF 3′ STOP: 268 leader length: 347 |
| 1790 | AGI number: AT3G05030.1 uORF ′5 STOP: 211 uORF 3′ STOP: 268 leader length: 347 |
| 1791 | AGI number: AT3G05030.1 uORF ′5 STOP: 92 uORF 3′ STOP: 278 leader length: 347 |
| 1792 | AGI number: AT3G05030.1 uORF ′5 STOP: 92 uORF 3′ STOP: 278 leader length: 347 |
| 1793 | AGI number: AT3G05030.1 uORF ′5 STOP: 129 uORF 3′ STOP: 297 leader length: 347 |
| 1794 | AGI number: AT3G05030.1 uORF ′5 STOP: 129 uORF 3′ STOP: 297 leader length: 347 |
| 1795 | AGI number: AT3G05160.2 uORF ′5 STOP: 192 uORF 3′ STOP: 246 leader length: 587 |
| 1796 | AGI number: AT3G05160.2 uORF ′5 STOP: 192 uORF 3′ STOP: 246 leader length: 587 |
| 1797 | AGI number: AT3G05380.4 uORF ′5 STOP: 2 uORF 3′ STOP: 68 leader length: 127 |
| 1798 | AGI number: AT3G05380.4 uORF ′5 STOP: 2 uORF 3′ STOP: 68 leader length: 127 |
| 1799 | AGI number: AT3G05380.4 uORF ′5 STOP: 65 uORF 3′ STOP: 116 leader length: 127 |
| 1800 | AGI number: AT3G05380.4 uORF ′5 STOP: 65 uORF 3′ STOP: 116 leader length: 127 |
| 1801 | AGI number: AT3G05560.3 uORF ′5 STOP: 101 uORF 3′ STOP: 152 leader length: 292 |
| 1802 | AGI number: AT3G05560.3 uORF ′5 STOP: 101 uORF 3′ STOP: 152 leader length: 292 |
| 1803 | AGI number: AT3G05580.1 uORF ′5 STOP: 13 uORF 3′ STOP: 85 leader length: 270 |
| 1804 | AGI number: AT3G05580.1 uORF ′5 STOP: 13 uORF 3′ STOP: 85 leader length: 270 |
| 1805 | AGI number: AT3G05690.1 uORF ′5 STOP: 16 uORF 3′ STOP: 91 leader length: 200 |
| 1806 | AGI number: AT3G05690.1 uORF ′5 STOP: 16 uORF 3′ STOP: 91 leader length: 200 |
| 1807 | AGI number: AT3G05710.1 uORF ′5 STOP: 69 uORF 3′ STOP: 174 leader length: 266 |
| 1808 | AGI number: AT3G05710.1 uORF ′5 STOP: 69 uORF 3′ STOP: 174 leader length: 266 |
| 1809 | AGI number: AT3G05710.2 uORF ′5 STOP: 62 uORF 3′ STOP: 167 leader length: 259 |
| 1810 | AGI number: AT3G05710.2 uORF ′5 STOP: 62 uORF 3′ STOP: 167 leader length: 259 |
| 1811 | AGI number: AT3G05750.1 uORF ′5 STOP: 88 uORF 3′ STOP: 271 leader length: 362 |
| 1812 | AGI number: AT3G05750.1 uORF ′5 STOP: 88 uORF 3′ STOP: 271 leader length: 362 |
| 1813 | AGI number: AT3G05750.1 uORF ′5 STOP: 188 uORF 3′ STOP: 251 leader length: 362 |
| 1814 | AGI number: AT3G05750.1 uORF ′5 STOP: 188 uORF 3′ STOP: 251 leader length: 362 |
| 1815 | AGI number: AT3G05937.1 uORF ′5 STOP: 290 uORF 3′ STOP: 461 leader length: 456 |
| 1816 | AGI number: AT3G05937.1 uORF ′5 STOP: 290 uORF 3′ STOP: 461 leader length: 456 |
| 1817 | AGI number: AT3G06270.1 uORF ′5 STOP: 26 uORF 3′ STOP: 206 leader length: 626 |
| 1818 | AGI number: AT3G06270.1 uORF ′5 STOP: 26 uORF 3′ STOP: 206 leader length: 626 |
| 1819 | AGI number: AT3G06270.1 uORF ′5 STOP: 296 uORF 3′ STOP: 551 leader length: 626 |
| 1820 | AGI number: AT3G06270.1 uORF ′5 STOP: 296 uORF 3′ STOP: 551 leader length: 626 |
| 1821 | AGI number: AT3G06360.1 uORF ′5 STOP: 20 uORF 3′ STOP: 188 leader length: 74 |
| 1822 | AGI number: AT3G06360.1 uORF ′5 STOP: 20 uORF 3′ STOP: 188 leader length: 74 |
| 1823 | AGI number: AT3G06620.1 uORF ′5 STOP: 69 uORF 3′ STOP: 171 leader length: 278 |
| 1824 | AGI number: AT3G06620.1 uORF ′5 STOP: 69 uORF 3′ STOP: 171 leader length: 278 |
| 1825 | AGI number: AT3G07100.1 uORF ′5 STOP: 276 uORF 3′ STOP: 426 leader length: 544 |
| 1826 | AGI number: AT3G07100.1 uORF ′5 STOP: 276 uORF 3′ STOP: 426 leader length: 544 |
| 1827 | AGI number: AT3G07170.1 uORF ′5 STOP: 10 uORF 3′ STOP: 97 leader length: 234 |
| 1828 | AGI number: AT3G07170.1 uORF ′5 STOP: 10 uORF 3′ STOP: 97 leader length: 234 |
| 1829 | AGI number: AT3G07210.1 uORF ′5 STOP: 4 uORF 3′ STOP: 181 leader length: 333 |
| 1830 | AGI number: AT3G07210.1 uORF ′5 STOP: 4 uORF 3′ STOP: 181 leader length: 333 |
| 1831 | AGI number: AT3G07550.1 uORF ′5 STOP: 14 uORF 3′ STOP: 83 leader length: 359 |
| 1832 | AGI number: AT3G07550.1 uORF ′5 STOP: 14 uORF 3′ STOP: 83 leader length: 359 |
| 1833 | AGI number: AT3G08510.2 uORF ′5 STOP: 11 uORF 3′ STOP: 209 leader length: 295 |
| 1834 | AGI number: AT3G08510.2 uORF ′5 STOP: 11 uORF 3′ STOP: 209 leader length: 295 |
| 1835 | AGI number: AT3G08680.2 uORF ′5 STOP: 59 uORF 3′ STOP: 293 leader length: 477 |
| 1836 | AGI number: AT3G08680.2 uORF ′5 STOP: 59 uORF 3′ STOP: 293 leader length: 477 |
| 1837 | AGI number: AT3G08730.1 uORF ′5 STOP: 159 uORF 3′ STOP: 228 leader length: 332 |
| 1838 | AGI number: AT3G08730.1 uORF ′5 STOP: 159 uORF 3′ STOP: 228 leader length: 332 |
| 1839 | AGI number: AT3G08730.1 uORF ′5 STOP: 103 uORF 3′ STOP: 247 leader length: 332 |
| 1840 | AGI number: AT3G08730.1 uORF ′5 STOP: 103 uORF 3′ STOP: 247 leader length: 332 |
| 1841 | AGI number: AT3G08980.1 uORF ′5 STOP: 33 uORF 3′ STOP: 213 leader length: 151 |
| 1842 | AGI number: AT3G08980.1 uORF ′5 STOP: 33 uORF 3′ STOP: 213 leader length: 151 |
| 1843 | AGI number: AT3G08980.1 uORF ′5 STOP: 133 uORF 3′ STOP: 232 leader length: 151 |
| 1844 | AGI number: AT3G08980.1 uORF ′5 STOP: 133 uORF 3′ STOP: 232 leader length: 151 |
| 1845 | AGI number: AT3G09150.3 uORF ′5 STOP: 208 uORF 3′ STOP: 262 leader length: 475 |
| 1846 | AGI number: AT3G09150.3 uORF ′5 STOP: 208 uORF 3′ STOP: 262 leader length: 475 |
| 1847 | AGI number: AT3G09350.2 uORF ′5 STOP: 122 uORF 3′ STOP: 257 leader length: 335 |
| 1848 | AGI number: AT3G09350.2 uORF ′5 STOP: 122 uORF 3′ STOP: 257 leader length: 335 |
| 1849 | AGI number: AT3G09350.3 uORF ′5 STOP: 70 uORF 3′ STOP: 280 leader length: 579 |
| 1850 | AGI number: AT3G09350.3 uORF ′5 STOP: 70 uORF 3′ STOP: 280 leader length: 579 |
| 1851 | AGI number: AT3G09350.3 uORF ′5 STOP: 207 uORF 3′ STOP: 276 leader length: 579 |
| 1852 | AGI number: AT3G09350.3 uORF ′5 STOP: 207 uORF 3′ STOP: 276 leader length: 579 |
| 1853 | AGI number: AT3G09350.3 uORF ′5 STOP: 122 uORF 3′ STOP: 257 leader length: 579 |
| 1854 | AGI number: AT3G09350.3 uORF ′5 STOP: 122 uORF 3′ STOP: 257 leader length: 579 |
| 1855 | AGI number: AT3G09560.1 uORF ′5 STOP: 158 uORF 3′ STOP: 242 leader length: 460 |
| 1856 | AGI number: AT3G09560.1 uORF ′5 STOP: 158 uORF 3′ STOP: 242 leader length: 460 |
| 1857 | AGI number: AT3G09820.2 uORF ′5 STOP: 40 uORF 3′ STOP: 205 leader length: 445 |
| 1858 | AGI number: AT3G09820.2 uORF ′5 STOP: 40 uORF 3′ STOP: 205 leader length: 445 |
| 1859 | AGI number: AT3G09820.2 uORF ′5 STOP: 15 uORF 3′ STOP: 138 leader length: 445 |
| 1860 | AGI number: AT3G09820.2 uORF ′5 STOP: 15 uORF 3′ STOP: 138 leader length: 445 |
| 1861 | AGI number: AT3G09920.1 uORF ′5 STOP: 98 uORF 3′ STOP: 179 leader length: 236 |
| 1862 | AGI number: AT3G09920.1 uORF ′5 STOP: 98 uORF 3′ STOP: 179 leader length: 236 |
| 1863 | AGI number: AT3G09920.2 uORF ′5 STOP: 154 uORF 3′ STOP: 214 leader length: 296 |
| 1864 | AGI number: AT3G09920.2 uORF ′5 STOP: 154 uORF 3′ STOP: 214 leader length: 296 |
| 1865 | AGI number: AT3G09920.2 uORF ′5 STOP: 158 uORF 3′ STOP: 239 leader length: 296 |
| 1866 | AGI number: AT3G09920.2 uORF ′5 STOP: 158 uORF 3′ STOP: 239 leader length: 296 |
| 1867 | AGI number: AT3G09920.3 uORF ′5 STOP: 305 uORF 3′ STOP: 365 leader length: 447 |
| 1868 | AGI number: AT3G09920.3 uORF ′5 STOP: 305 uORF 3′ STOP: 365 leader length: 447 |
| 1869 | AGI number: AT3G10640.2 uORF ′5 STOP: 3 uORF 3′ STOP: 207 leader length: 562 |
| 1870 | AGI number: AT3G10640.2 uORF ′5 STOP: 3 uORF 3′ STOP: 207 leader length: 562 |
| 1871 | AGI number: AT3G10910.1 uORF ′5 STOP: 156 uORF 3′ STOP: 345 leader length: 406 |
| 1872 | AGI number: AT3G10910.1 uORF ′5 STOP: 156 uORF 3′ STOP: 345 leader length: 406 |
| 1873 | AGI number: AT3G10915.4 uORF ′5 STOP: 92 uORF 3′ STOP: 161 leader length: 291 |
| 1874 | AGI number: AT3G10915.4 uORF ′5 STOP: 92 uORF 3′ STOP: 161 leader length: 291 |
| 1875 | AGI number: AT3G10915.4 uORF ′5 STOP: 123 uORF 3′ STOP: 186 leader length: 291 |
| 1876 | AGI number: AT3G10915.4 uORF ′5 STOP: 123 uORF 3′ STOP: 186 leader length: 291 |
| 1877 | AGI number: AT3G10915.5 uORF ′5 STOP: 45 uORF 3′ STOP: 123 leader length: 291 |
| 1878 | AGI number: AT3G10915.5 uORF ′5 STOP: 45 uORF 3′ STOP: 123 leader length: 291 |
| 1879 | AGI number: AT3G10930.1 uORF ′5 STOP: 262 uORF 3′ STOP: 352 leader length: 299 |
| 1880 | AGI number: AT3G10930.1 uORF ′5 STOP: 262 uORF 3′ STOP: 352 leader length: 299 |
| 1881 | AGI number: AT3G10930.1 uORF ′5 STOP: 50 uORF 3′ STOP: 368 leader length: 299 |
| 1882 | AGI number: AT3G10930.1 uORF ′5 STOP: 50 uORF 3′ STOP: 368 leader length: 299 |
| 1883 | AGI number: AT3G11200.2 uORF ′5 STOP: 173 uORF 3′ STOP: 233 leader length: 357 |
| 1884 | AGI number: AT3G11200.2 uORF ′5 STOP: 173 uORF 3′ STOP: 233 leader length: 357 |
| 1885 | AGI number: AT3G11200.2 uORF ′5 STOP: 118 uORF 3′ STOP: 241 leader length: 357 |
| 1886 | AGI number: AT3G11200.2 uORF ′5 STOP: 118 uORF 3′ STOP: 241 leader length: 357 |
| 1887 | AGI number: AT3G11200.2 uORF ′5 STOP: 306 uORF 3′ STOP: 375 leader length: 357 |
| 1888 | AGI number: AT3G11200.2 uORF ′5 STOP: 306 uORF 3′ STOP: 375 leader length: 357 |
| 1889 | AGI number: AT3G11320.1 uORF ′5 STOP: 9 uORF 3′ STOP: 174 leader length: 317 |
| 1890 | AGI number: AT3G11320.1 uORF ′5 STOP: 9 uORF 3′ STOP: 174 leader length: 317 |
| 1891 | AGI number: AT3G11530.2 uORF ′5 STOP: 56 uORF 3′ STOP: 236 leader length: 546 |
| 1892 | AGI number: AT3G11530.2 uORF ′5 STOP: 56 uORF 3′ STOP: 236 leader length: 546 |
| 1893 | AGI number: AT3G11850.2 uORF ′5 STOP: 218 uORF 3′ STOP: 425 leader length: 520 |
| 1894 | AGI number: AT3G11850.2 uORF ′5 STOP: 218 uORF 3′ STOP: 425 leader length: 520 |
| 1895 | AGI number: AT3G11850.2 uORF ′5 STOP: 250 uORF 3′ STOP: 430 leader length: 520 |
| 1896 | AGI number: AT3G11850.2 uORF ′5 STOP: 250 uORF 3′ STOP: 430 leader length: 520 |
| 1897 | AGI number: AT3G12200.2 uORF ′5 STOP: 204 uORF 3′ STOP: 270 leader length: 450 |
| 1898 | AGI number: AT3G12200.2 uORF ′5 STOP: 204 uORF 3′ STOP: 270 leader length: 450 |
| 1899 | AGI number: AT3G12280.2 uORF ′5 STOP: 62 uORF 3′ STOP: 143 leader length: 297 |
| 1900 | AGI number: AT3G12280.2 uORF ′5 STOP: 62 uORF 3′ STOP: 143 leader length: 297 |
| 1901 | AGI number: AT3G12550.1 uORF ′5 STOP: 207 uORF 3′ STOP: 306 leader length: 285 |
| 1902 | AGI number: AT3G12550.1 uORF ′5 STOP: 207 uORF 3′ STOP: 306 leader length: 285 |
| 1903 | AGI number: AT3G12570.2 uORF ′5 STOP: 194 uORF 3′ STOP: 308 leader length: 381 |
| 1904 | AGI number: AT3G12570.2 uORF ′5 STOP: 194 uORF 3′ STOP: 308 leader length: 381 |
| 1905 | AGI number: AT3G12570.2 uORF ′5 STOP: 238 uORF 3′ STOP: 304 leader length: 381 |
| 1906 | AGI number: AT3G12570.2 uORF ′5 STOP: 238 uORF 3′ STOP: 304 leader length: 381 |
| 1907 | AGI number: AT3G12620.2 uORF ′5 STOP: 43 uORF 3′ STOP: 133 leader length: 354 |
| 1908 | AGI number: AT3G12620.2 uORF ′5 STOP: 43 uORF 3′ STOP: 133 leader length: 354 |
| 1909 | AGI number: AT3G12620.2 uORF ′5 STOP: 77 uORF 3′ STOP: 164 leader length: 354 |
| 1910 | AGI number: AT3G12620.2 uORF ′5 STOP: 77 uORF 3′ STOP: 164 leader length: 354 |
| 1911 | AGI number: AT3G12770.1 uORF ′5 STOP: 17 uORF 3′ STOP: 134 leader length: 21 |
| 1912 | AGI number: AT3G12770.1 uORF ′5 STOP: 17 uORF 3′ STOP: 134 leader length: 21 |
| 1913 | AGI number: AT3G13000.1 uORF ′5 STOP: 113 uORF 3′ STOP: 275 leader length: 536 |
| 1914 | AGI number: AT3G13000.1 uORF ′5 STOP: 113 uORF 3′ STOP: 275 leader length: 536 |
| 1915 | AGI number: AT3G13030.3 uORF ′5 STOP: 155 uORF 3′ STOP: 260 leader length: 252 |
| 1916 | AGI number: AT3G13030.3 uORF ′5 STOP: 155 uORF 3′ STOP: 260 leader length: 252 |
| 1917 | AGI number: AT3G13190.1 uORF ′5 STOP: 101 uORF 3′ STOP: 158 leader length: 287 |
| 1918 | AGI number: AT3G13190.1 uORF ′5 STOP: 101 uORF 3′ STOP: 158 leader length: 287 |
| 1919 | AGI number: AT3G13190.2 uORF ′5 STOP: 62 uORF 3′ STOP: 119 leader length: 253 |
| 1920 | AGI number: AT3G13190.2 uORF ′5 STOP: 62 uORF 3′ STOP: 119 leader length: 253 |
| 1921 | AGI number: AT3G13430.2 uORF ′5 STOP: 46 uORF 3′ STOP: 124 leader length: 247 |
| 1922 | AGI number: AT3G13430.2 uORF ′5 STOP: 46 uORF 3′ STOP: 124 leader length: 247 |
| 1923 | AGI number: AT3G13440.1 uORF ′5 STOP: 149 uORF 3′ STOP: 329 leader length: 982 |
| 1924 | AGI number: AT3G13440.1 uORF ′5 STOP: 149 uORF 3′ STOP: 329 leader length: 982 |
| 1925 | AGI number: AT3G13580.3 uORF ′5 STOP: 8 uORF 3′ STOP: 122 leader length: 638 |
| 1926 | AGI number: AT3G13580.3 uORF ′5 STOP: 8 uORF 3′ STOP: 122 leader length: 638 |
| 1927 | AGI number: AT3G13690.1 uORF ′5 STOP: 413 uORF 3′ STOP: 665 leader length: 839 |
| 1928 | AGI number: AT3G13690.1 uORF ′5 STOP: 413 uORF 3′ STOP: 665 leader length: 839 |
| 1929 | AGI number: AT3G13690.1 uORF ′5 STOP: 568 uORF 3′ STOP: 685 leader length: 839 |
| 1930 | AGI number: AT3G13690.1 uORF ′5 STOP: 568 uORF 3′ STOP: 685 leader length: 839 |
| 1931 | AGI number: AT3G13700.1 uORF ′5 STOP: 710 uORF 3′ STOP: 830 leader length: 1105 |
| 1932 | AGI number: AT3G13700.1 uORF ′5 STOP: 710 uORF 3′ STOP: 830 leader length: 1105 |
| 1933 | AGI number: AT3G13700.1 uORF ′5 STOP: 123 uORF 3′ STOP: 747 leader length: 1105 |
| 1934 | AGI number: AT3G13700.1 uORF ′5 STOP: 123 uORF 3′ STOP: 747 leader length: 1105 |
| 1935 | AGI number: AT3G13700.1 uORF ′5 STOP: 661 uORF 3′ STOP: 727 leader length: 1105 |
| 1936 | AGI number: AT3G13700.1 uORF ′5 STOP: 661 uORF 3′ STOP: 727 leader length: 1105 |
| 1937 | AGI number: AT3G13700.2 uORF ′5 STOP: 123 uORF 3′ STOP: 747 leader length: 1105 |
| 1938 | AGI number: AT3G13700.2 uORF ′5 STOP: 123 uORF 3′ STOP: 747 leader length: 1105 |
| 1939 | AGI number: AT3G13700.2 uORF ′5 STOP: 661 uORF 3′ STOP: 727 leader length: 1105 |
| 1940 | AGI number: AT3G13700.2 uORF ′5 STOP: 661 uORF 3′ STOP: 727 leader length: 1105 |
| 1941 | AGI number: AT3G13857.1 uORF ′5 STOP: 18 uORF 3′ STOP: 69 leader length: 64 |
| 1942 | AGI number: AT3G13857.1 uORF ′5 STOP: 18 uORF 3′ STOP: 69 leader length: 64 |
| 1943 | AGI number: AT3G14010.4 uORF ′5 STOP: 94 uORF 3′ STOP: 235 leader length: 379 |
| 1944 | AGI number: AT3G14010.4 uORF ′5 STOP: 94 uORF 3′ STOP: 235 leader length: 379 |
| 1945 | AGI number: AT3G14020.1 uORF ′5 STOP: 28 uORF 3′ STOP: 103 leader length: 314 |
| 1946 | AGI number: AT3G14020.1 uORF ′5 STOP: 28 uORF 3′ STOP: 103 leader length: 314 |
| 1947 | AGI number: AT3G14110.2 uORF ′5 STOP: 239 uORF 3′ STOP: 299 leader length: 439 |
| 1948 | AGI number: AT3G14110.2 uORF ′5 STOP: 239 uORF 3′ STOP: 299 leader length: 439 |
| 1949 | AGI number: AT3G14110.2 uORF ′5 STOP: 178 uORF 3′ STOP: 322 leader length: 439 |
| 1950 | AGI number: AT3G14110.2 uORF ′5 STOP: 178 uORF 3′ STOP: 322 leader length: 439 |
| 1951 | AGI number: AT3G14172.1 uORF ′5 STOP: 78 uORF 3′ STOP: 168 leader length: 395 |
| 1952 | AGI number: AT3G14172.1 uORF ′5 STOP: 78 uORF 3′ STOP: 168 leader length: 395 |
| 1953 | AGI number: AT3G14172.2 uORF ′5 STOP: 98 uORF 3′ STOP: 188 leader length: 415 |
| 1954 | AGI number: AT3G14172.2 uORF ′5 STOP: 98 uORF 3′ STOP: 188 leader length: 415 |
| 1955 | AGI number: AT3G14172.2 uORF ′5 STOP: 198 uORF 3′ STOP: 321 leader length: 415 |
| 1956 | AGI number: AT3G14172.2 uORF ′5 STOP: 198 uORF 3′ STOP: 321 leader length: 415 |
| 1957 | AGI number: AT3G14415.3 uORF ′5 STOP: 6 uORF 3′ STOP: 180 leader length: 295 |
| 1958 | AGI number: AT3G14415.3 uORF ′5 STOP: 6 uORF 3′ STOP: 180 leader length: 295 |
| 1959 | AGI number: AT3G14590.1 uORF ′5 STOP: 31 uORF 3′ STOP: 151 leader length: 487 |
| 1960 | AGI number: AT3G14590.1 uORF ′5 STOP: 31 uORF 3′ STOP: 151 leader length: 487 |
| 1961 | AGI number: AT3G14590.1 uORF ′5 STOP: 101 uORF 3′ STOP: 164 leader length: 487 |
| 1962 | AGI number: AT3G14590.1 uORF ′5 STOP: 101 uORF 3′ STOP: 164 leader length: 487 |
| 1963 | AGI number: AT3G14590.2 uORF ′5 STOP: 30 uORF 3′ STOP: 150 leader length: 251 |
| 1964 | AGI number: AT3G14590.2 uORF ′5 STOP: 30 uORF 3′ STOP: 150 leader length: 251 |
| 1965 | AGI number: AT3G14590.2 uORF ′5 STOP: 100 uORF 3′ STOP: 163 leader length: 251 |
| 1966 | AGI number: AT3G14590.2 uORF ′5 STOP: 100 uORF 3′ STOP: 163 leader length: 251 |
| 1967 | AGI number: AT3G15030.3 uORF ′5 STOP: 92 uORF 3′ STOP: 149 leader length: 307 |
| 1968 | AGI number: AT3G15030.3 uORF ′5 STOP: 92 uORF 3′ STOP: 149 leader length: 307 |
| 1969 | AGI number: AT3G15220.1 uORF ′5 STOP: 2 uORF 3′ STOP: 89 leader length: 199 |
| 1970 | AGI number: AT3G15220.1 uORF ′5 STOP: 2 uORF 3′ STOP: 89 leader length: 199 |
| 1971 | AGI number: AT3G15220.1 uORF ′5 STOP: 9 uORF 3′ STOP: 84 leader length: 199 |
| 1972 | AGI number: AT3G15220.1 uORF ′5 STOP: 9 uORF 3′ STOP: 84 leader length: 199 |
| 1973 | AGI number: AT3G15350.1 uORF ′5 STOP: 70 uORF 3′ STOP: 295 leader length: 420 |
| 1974 | AGI number: AT3G15350.1 uORF ′5 STOP: 70 uORF 3′ STOP: 295 leader length: 420 |
| 1975 | AGI number: AT3G15350.1 uORF ′5 STOP: 105 uORF 3′ STOP: 156 leader length: 420 |
| 1976 | AGI number: AT3G15350.1 uORF ′5 STOP: 105 uORF 3′ STOP: 156 leader length: 420 |
| 1977 | AGI number: AT3G15351.3 uORF ′5 STOP: 52 uORF 3′ STOP: 121 leader length: 213 |
| 1978 | AGI number: AT3G15351.3 uORF ′5 STOP: 52 uORF 3′ STOP: 121 leader length: 213 |
| 1979 | AGI number: AT3G15351.3 uORF ′5 STOP: 69 uORF 3′ STOP: 147 leader length: 213 |
| 1980 | AGI number: AT3G15351.3 uORF ′5 STOP: 69 uORF 3′ STOP: 147 leader length: 213 |
| 1981 | AGI number: AT3G15354.1 uORF ′5 STOP: 108 uORF 3′ STOP: 171 leader length: 357 |
| 1982 | AGI number: AT3G15354.1 uORF ′5 STOP: 108 uORF 3′ STOP: 171 leader length: 357 |
| 1983 | AGI number: AT3G15430.1 uORF ′5 STOP: 199 uORF 3′ STOP: 313 leader length: 388 |
| 1984 | AGI number: AT3G15430.1 uORF ′5 STOP: 199 uORF 3′ STOP: 313 leader length: 388 |
| 1985 | AGI number: AT3G15430.1 uORF ′5 STOP: 173 uORF 3′ STOP: 305 leader length: 388 |
| 1986 | AGI number: AT3G15430.1 uORF ′5 STOP: 173 uORF 3′ STOP: 305 leader length: 388 |
| 1987 | AGI number: AT3G15430.2 uORF ′5 STOP: 185 uORF 3′ STOP: 425 leader length: 516 |
| 1988 | AGI number: AT3G15430.2 uORF ′5 STOP: 185 uORF 3′ STOP: 425 leader length: 516 |
| 1989 | AGI number: AT3G15430.2 uORF ′5 STOP: 301 uORF 3′ STOP: 433 leader length: 516 |
| 1990 | AGI number: AT3G15430.2 uORF ′5 STOP: 301 uORF 3′ STOP: 433 leader length: 516 |
| 1991 | AGI number: AT3G15430.2 uORF ′5 STOP: 327 uORF 3′ STOP: 441 leader length: 516 |
| 1992 | AGI number: AT3G15430.2 uORF ′5 STOP: 327 uORF 3′ STOP: 441 leader length: 516 |
| 1993 | AGI number: AT3G17120.1 uORF ′5 STOP: 115 uORF 3′ STOP: 259 leader length: 762 |
| 1994 | AGI number: AT3G17120.1 uORF ′5 STOP: 115 uORF 3′ STOP: 259 leader length: 762 |
| 1995 | AGI number: AT3G17120.1 uORF ′5 STOP: 56 uORF 3′ STOP: 113 leader length: 762 |
| 1996 | AGI number: AT3G17120.1 uORF ′5 STOP: 56 uORF 3′ STOP: 113 leader length: 762 |
| 1997 | AGI number: AT3G17310.1 uORF ′5 STOP: 150 uORF 3′ STOP: 300 leader length: 325 |
| 1998 | AGI number: AT3G17310.1 uORF ′5 STOP: 150 uORF 3′ STOP: 300 leader length: 325 |
| 1999 | AGI number: AT3G17450.1 uORF ′5 STOP: 97 uORF 3′ STOP: 148 leader length: 302 |
| 2000 | AGI number: AT3G17450.1 uORF ′5 STOP: 97 uORF 3′ STOP: 148 leader length: 302 |
| 2001 | AGI number: AT3G17580.1 uORF ′5 STOP: 79 uORF 3′ STOP: 373 leader length: 92 |
| 2002 | AGI number: AT3G17580.1 uORF ′5 STOP: 79 uORF 3′ STOP: 373 leader length: 92 |
| 2003 | AGI number: AT3G17609.3 uORF ′5 STOP: 8 uORF 3′ STOP: 107 leader length: 198 |
| 2004 | AGI number: AT3G17609.3 uORF ′5 STOP: 8 uORF 3′ STOP: 107 leader length: 198 |
| 2005 | AGI number: AT3G17611.2 uORF ′5 STOP: 114 uORF 3′ STOP: 219 leader length: 541 |
| 2006 | AGI number: AT3G17611.2 uORF ′5 STOP: 114 uORF 3′ STOP: 219 leader length: 541 |
| 2007 | AGI number: AT3G17611.2 uORF ′5 STOP: 137 uORF 3′ STOP: 254 leader length: 541 |
| 2008 | AGI number: AT3G17611.2 uORF ′5 STOP: 137 uORF 3′ STOP: 254 leader length: 541 |
| 2009 | AGI number: AT3G17950.2 uORF ′5 STOP: 13 uORF 3′ STOP: 133 leader length: 410 |
| 2010 | AGI number: AT3G17950.2 uORF ′5 STOP: 13 uORF 3′ STOP: 133 leader length: 410 |
| 2011 | AGI number: AT3G18160.2 uORF ′5 STOP: 342 uORF 3′ STOP: 474 leader length: 545 |
| 2012 | AGI number: AT3G18160.2 uORF ′5 STOP: 342 uORF 3′ STOP: 474 leader length: 545 |
| 2013 | AGI number: AT3G18370.1 uORF ′5 STOP: 24 uORF 3′ STOP: 81 leader length: 387 |
| 2014 | AGI number: AT3G18370.1 uORF ′5 STOP: 24 uORF 3′ STOP: 81 leader length: 387 |
| 2015 | AGI number: AT3G18620.1 uORF ′5 STOP: 290 uORF 3′ STOP: 344 leader length: 531 |
| 2016 | AGI number: AT3G18620.1 uORF ′5 STOP: 290 uORF 3′ STOP: 344 leader length: 531 |
| 2017 | AGI number: AT3G18770.1 uORF ′5 STOP: 25 uORF 3′ STOP: 127 leader length: 323 |
| 2018 | AGI number: AT3G18770.1 uORF ′5 STOP: 25 uORF 3′ STOP: 127 leader length: 323 |
| 2019 | AGI number: AT3G19250.1 uORF ′5 STOP: 197 uORF 3′ STOP: 251 leader length: 387 |
| 2020 | AGI number: AT3G19250.1 uORF ′5 STOP: 197 uORF 3′ STOP: 251 leader length: 387 |
| 2021 | AGI number: AT3G19250.1 uORF ′5 STOP: 178 uORF 3′ STOP: 259 leader length: 387 |
| 2022 | AGI number: AT3G19250.1 uORF ′5 STOP: 178 uORF 3′ STOP: 259 leader length: 387 |
| 2023 | AGI number: AT3G19440.1 uORF ′5 STOP: 73 uORF 3′ STOP: 253 leader length: 83 |
| 2024 | AGI number: AT3G19440.1 uORF ′5 STOP: 73 uORF 3′ STOP: 253 leader length: 83 |
| 2025 | AGI number: AT3G20040.1 uORF ′5 STOP: 217 uORF 3′ STOP: 277 leader length: 423 |
| 2026 | AGI number: AT3G20040.1 uORF ′5 STOP: 217 uORF 3′ STOP: 277 leader length: 423 |
| 2027 | AGI number: AT3G20040.1 uORF ′5 STOP: 252 uORF 3′ STOP: 315 leader length: 423 |
| 2028 | AGI number: AT3G20040.1 uORF ′5 STOP: 252 uORF 3′ STOP: 315 leader length: 423 |
| 2029 | AGI number: AT3G20200.1 uORF ′5 STOP: 183 uORF 3′ STOP: 294 leader length: 314 |
| 2030 | AGI number: AT3G20200.1 uORF ′5 STOP: 183 uORF 3′ STOP: 294 leader length: 314 |
| 2031 | AGI number: AT3G20260.1 uORF ′5 STOP: 256 uORF 3′ STOP: 349 leader length: 752 |
| 2032 | AGI number: AT3G20260.1 uORF ′5 STOP: 256 uORF 3′ STOP: 349 leader length: 752 |
| 2033 | AGI number: AT3G20260.1 uORF ′5 STOP: 203 uORF 3′ STOP: 356 leader length: 752 |
| 2034 | AGI number: AT3G20260.1 uORF ′5 STOP: 203 uORF 3′ STOP: 356 leader length: 752 |
| 2035 | AGI number: AT3G20430.1 uORF ′5 STOP: 21 uORF 3′ STOP: 90 leader length: 144 |
| 2036 | AGI number: AT3G20430.1 uORF ′5 STOP: 21 uORF 3′ STOP: 90 leader length: 144 |
| 2037 | AGI number: AT3G20620.1 uORF ′5 STOP: 114 uORF 3′ STOP: 255 leader length: 321 |
| 2038 | AGI number: AT3G20620.1 uORF ′5 STOP: 114 uORF 3′ STOP: 255 leader length: 321 |
| 2039 | AGI number: AT3G20810.1 uORF ′5 STOP: 38 uORF 3′ STOP: 251 leader length: 108 |
| 2040 | AGI number: AT3G20810.1 uORF ′5 STOP: 38 uORF 3′ STOP: 251 leader length: 108 |
| 2041 | AGI number: AT3G20870.1 uORF ′5 STOP: 69 uORF 3′ STOP: 123 leader length: 276 |
| 2042 | AGI number: AT3G20870.1 uORF ′5 STOP: 69 uORF 3′ STOP: 123 leader length: 276 |
| 2043 | AGI number: AT3G21250.2 uORF ′5 STOP: 64 uORF 3′ STOP: 166 leader length: 264 |
| 2044 | AGI number: AT3G21250.2 uORF ′5 STOP: 64 uORF 3′ STOP: 166 leader length: 264 |
| 2045 | AGI number: AT3G21250.2 uORF ′5 STOP: 102 uORF 3′ STOP: 171 leader length: 264 |
| 2046 | AGI number: AT3G21250.2 uORF ′5 STOP: 102 uORF 3′ STOP: 171 leader length: 264 |
| 2047 | AGI number: AT3G21295.1 uORF ′5 STOP: 79 uORF 3′ STOP: 136 leader length: 399 |
| 2048 | AGI number: AT3G21295.1 uORF ′5 STOP: 79 uORF 3′ STOP: 136 leader length: 399 |
| 2049 | AGI number: AT3G21310.1 uORF ′5 STOP: 102 uORF 3′ STOP: 156 leader length: 291 |
| 2050 | AGI number: AT3G21310.1 uORF ′5 STOP: 102 uORF 3′ STOP: 156 leader length: 291 |
| 2051 | AGI number: AT3G21700.1 uORF ′5 STOP: 41 uORF 3′ STOP: 119 leader length: 211 |
| 2052 | AGI number: AT3G21700.1 uORF ′5 STOP: 41 uORF 3′ STOP: 119 leader length: 211 |
| 2053 | AGI number: AT3G22415.1 uORF ′5 STOP: 25 uORF 3′ STOP: 220 leader length: 154 |
| 2054 | AGI number: AT3G22415.1 uORF ′5 STOP: 25 uORF 3′ STOP: 220 leader length: 154 |
| 2055 | AGI number: AT3G22550.1 uORF ′5 STOP: 29 uORF 3′ STOP: 149 leader length: 498 |
| 2056 | AGI number: AT3G22550.1 uORF ′5 STOP: 29 uORF 3′ STOP: 149 leader length: 498 |
| 2057 | AGI number: AT3G22550.1 uORF ′5 STOP: 206 uORF 3′ STOP: 284 leader length: 498 |
| 2058 | AGI number: AT3G22550.1 uORF ′5 STOP: 206 uORF 3′ STOP: 284 leader length: 498 |
| 2059 | AGI number: AT3G22750.1 uORF ′5 STOP: 261 uORF 3′ STOP: 369 leader length: 807 |
| 2060 | AGI number: AT3G22750.1 uORF ′5 STOP: 261 uORF 3′ STOP: 369 leader length: 807 |
| 2061 | AGI number: AT3G22750.1 uORF ′5 STOP: 504 uORF 3′ STOP: 561 leader length: 807 |
| 2062 | AGI number: AT3G22750.1 uORF ′5 STOP: 504 uORF 3′ STOP: 561 leader length: 807 |
| 2063 | AGI number: AT3G22750.1 uORF ′5 STOP: 634 uORF 3′ STOP: 721 leader length: 807 |
| 2064 | AGI number: AT3G22750.1 uORF ′5 STOP: 634 uORF 3′ STOP: 721 leader length: 807 |
| 2065 | AGI number: AT3G22970.1 uORF ′5 STOP: 202 uORF 3′ STOP: 310 leader length: 554 |
| 2066 | AGI number: AT3G22970.1 uORF ′5 STOP: 202 uORF 3′ STOP: 310 leader length: 554 |
| 2067 | AGI number: AT3G22970.2 uORF ′5 STOP: 101 uORF 3′ STOP: 221 leader length: 885 |
| 2068 | AGI number: AT3G22970.2 uORF ′5 STOP: 101 uORF 3′ STOP: 221 leader length: 885 |
| 2069 | AGI number: AT3G22970.2 uORF ′5 STOP: 202 uORF 3′ STOP: 310 leader length: 885 |
| 2070 | AGI number: AT3G22970.2 uORF ′5 STOP: 202 uORF 3′ STOP: 310 leader length: 885 |
| 2071 | AGI number: AT3G23160.1 uORF ′5 STOP: 92 uORF 3′ STOP: 230 leader length: 374 |
| 2072 | AGI number: AT3G23160.1 uORF ′5 STOP: 92 uORF 3′ STOP: 230 leader length: 374 |
| 2073 | AGI number: AT3G23160.1 uORF ′5 STOP: 217 uORF 3′ STOP: 283 leader length: 374 |
| 2074 | AGI number: AT3G23160.1 uORF ′5 STOP: 217 uORF 3′ STOP: 283 leader length: 374 |
| 2075 | AGI number: AT3G24070.1 uORF ′5 STOP: 437 uORF 3′ STOP: 503 leader length: 458 |
| 2076 | AGI number: AT3G24070.1 uORF ′5 STOP: 437 uORF 3′ STOP: 503 leader length: 458 |
| 2077 | AGI number: AT3G24070.1 uORF ′5 STOP: 70 uORF 3′ STOP: 448 leader length: 458 |
| 2078 | AGI number: AT3G24070.1 uORF ′5 STOP: 70 uORF 3′ STOP: 448 leader length: 458 |
| 2079 | AGI number: AT3G24490.1 uORF ′5 STOP: 50 uORF 3′ STOP: 134 leader length: 252 |
| 2080 | AGI number: AT3G24490.1 uORF ′5 STOP: 50 uORF 3′ STOP: 134 leader length: 252 |
| 2081 | AGI number: AT3G25570.1 uORF ′5 STOP: 198 uORF 3′ STOP: 369 leader length: 500 |
| 2082 | AGI number: AT3G25570.1 uORF ′5 STOP: 198 uORF 3′ STOP: 369 leader length: 500 |
| 2083 | AGI number: AT3G25570.2 uORF ′5 STOP: 258 uORF 3′ STOP: 354 leader length: 459 |
| 2084 | AGI number: AT3G25570.2 uORF ′5 STOP: 258 uORF 3′ STOP: 354 leader length: 459 |
| 2085 | AGI number: AT3G25585.4 uORF ′5 STOP: 75 uORF 3′ STOP: 129 leader length: 360 |
| 2086 | AGI number: AT3G25585.4 uORF ′5 STOP: 75 uORF 3′ STOP: 129 leader length: 360 |
| 2087 | AGI number: AT3G25585.4 uORF ′5 STOP: 85 uORF 3′ STOP: 175 leader length: 360 |
| 2088 | AGI number: AT3G25585.4 uORF ′5 STOP: 85 uORF 3′ STOP: 175 leader length: 360 |
| 2089 | AGI number: AT3G25590.1 uORF ′5 STOP: 38 uORF 3′ STOP: 119 leader length: 261 |
| 2090 | AGI number: AT3G25590.1 uORF ′5 STOP: 38 uORF 3′ STOP: 119 leader length: 261 |
| 2091 | AGI number: AT3G25597.1 uORF ′5 STOP: 99 uORF 3′ STOP: 333 leader length: 181 |
| 2092 | AGI number: AT3G25597.1 uORF ′5 STOP: 99 uORF 3′ STOP: 333 leader length: 181 |
| 2093 | AGI number: AT3G25840.2 uORF ′5 STOP: 82 uORF 3′ STOP: 475 leader length: 950 |
| 2094 | AGI number: AT3G25840.2 uORF ′5 STOP: 82 uORF 3′ STOP: 475 leader length: 950 |
| 2095 | AGI number: AT3G25840.2 uORF ′5 STOP: 396 uORF 3′ STOP: 453 leader length: 950 |
| 2096 | AGI number: AT3G25840.2 uORF ′5 STOP: 396 uORF 3′ STOP: 453 leader length: 950 |
| 2097 | AGI number: AT3G25840.2 uORF ′5 STOP: 407 uORF 3′ STOP: 467 leader length: 950 |
| 2098 | AGI number: AT3G25840.2 uORF ′5 STOP: 407 uORF 3′ STOP: 467 leader length: 950 |
| 2099 | AGI number: AT3G26000.1 uORF ′5 STOP: 98 uORF 3′ STOP: 296 leader length: 716 |
| 2100 | AGI number: AT3G26000.1 uORF ′5 STOP: 98 uORF 3′ STOP: 296 leader length: 716 |
| 2101 | AGI number: AT3G26000.1 uORF ′5 STOP: 229 uORF 3′ STOP: 289 leader length: 716 |
| 2102 | AGI number: AT3G26000.1 uORF ′5 STOP: 229 uORF 3′ STOP: 289 leader length: 716 |
| 2103 | AGI number: AT3G26085.2 uORF ′5 STOP: 95 uORF 3′ STOP: 269 leader length: 182 |
| 2104 | AGI number: AT3G26085.2 uORF ′5 STOP: 95 uORF 3′ STOP: 269 leader length: 182 |
| 2105 | AGI number: AT3G26085.2 uORF ′5 STOP: 139 uORF 3′ STOP: 298 leader length: 182 |
| 2106 | AGI number: AT3G26085.2 uORF ′5 STOP: 139 uORF 3′ STOP: 298 leader length: 182 |
| 2107 | AGI number: AT3G26100.1 uORF ′5 STOP: 263 uORF 3′ STOP: 326 leader length: 829 |
| 2108 | AGI number: AT3G26100.1 uORF ′5 STOP: 263 uORF 3′ STOP: 326 leader length: 829 |
| 2109 | AGI number: AT3G26100.2 uORF ′5 STOP: 377 uORF 3′ STOP: 440 leader length: 548 |
| 2110 | AGI number: AT3G26100.2 uORF ′5 STOP: 377 uORF 3′ STOP: 440 leader length: 548 |
| 2111 | AGI number: AT3G26230.1 uORF ′5 STOP: 52 uORF 3′ STOP: 307 leader length: 67 |
| 2112 | AGI number: AT3G26230.1 uORF ′5 STOP: 52 uORF 3′ STOP: 307 leader length: 67 |
| 2113 | AGI number: AT3G26430.1 uORF ′5 STOP: 48 uORF 3′ STOP: 828 leader length: 1981 |
| 2114 | AGI number: AT3G26430.1 uORF ′5 STOP: 48 uORF 3′ STOP: 828 leader length: 1981 |
| 2115 | AGI number: AT3G26430.1 uORF ′5 STOP: 797 uORF 3′ STOP: 848 leader length: 1981 |
| 2116 | AGI number: AT3G26430.1 uORF ′5 STOP: 797 uORF 3′ STOP: 848 leader length: 1981 |
| 2117 | AGI number: AT3G26440.4 uORF ′5 STOP: 98 uORF 3′ STOP: 152 leader length: 540 |
| 2118 | AGI number: AT3G26440.4 uORF ′5 STOP: 98 uORF 3′ STOP: 152 leader length: 540 |
| 2119 | AGI number: AT3G26690.2 uORF ′5 STOP: 197 uORF 3′ STOP: 248 leader length: 317 |
| 2120 | AGI number: AT3G26690.2 uORF ′5 STOP: 197 uORF 3′ STOP: 248 leader length: 317 |
| 2121 | AGI number: AT3G26744.1 uORF ′5 STOP: 40 uORF 3′ STOP: 127 leader length: 297 |
| 2122 | AGI number: AT3G26744.1 uORF ′5 STOP: 40 uORF 3′ STOP: 127 leader length: 297 |
| 2123 | AGI number: AT3G26744.2 uORF ′5 STOP: 14 uORF 3′ STOP: 77 leader length: 210 |
| 2124 | AGI number: AT3G26744.2 uORF ′5 STOP: 14 uORF 3′ STOP: 77 leader length: 210 |
| 2125 | AGI number: AT3G26890.1 uORF ′5 STOP: 196 uORF 3′ STOP: 391 leader length: 551 |
| 2126 | AGI number: AT3G26890.1 uORF ′5 STOP: 196 uORF 3′ STOP: 391 leader length: 551 |
| 2127 | AGI number: AT3G26890.1 uORF ′5 STOP: 308 uORF 3′ STOP: 380 leader length: 551 |
| 2128 | AGI number: AT3G26890.1 uORF ′5 STOP: 308 uORF 3′ STOP: 380 leader length: 551 |
| 2129 | AGI number: AT3G26890.1 uORF ′5 STOP: 377 uORF 3′ STOP: 470 leader length: 551 |
| 2130 | AGI number: AT3G26890.1 uORF ′5 STOP: 377 uORF 3′ STOP: 470 leader length: 551 |
| 2131 | AGI number: AT3G26890.2 uORF ′5 STOP: 52 uORF 3′ STOP: 376 leader length: 536 |
| 2132 | AGI number: AT3G26890.2 uORF ′5 STOP: 52 uORF 3′ STOP: 376 leader length: 536 |
| 2133 | AGI number: AT3G26890.2 uORF ′5 STOP: 293 uORF 3′ STOP: 365 leader length: 536 |
| 2134 | AGI number: AT3G26890.2 uORF ′5 STOP: 293 uORF 3′ STOP: 365 leader length: 536 |
| 2135 | AGI number: AT3G26890.3 uORF ′5 STOP: 236 uORF 3′ STOP: 443 leader length: 603 |
| 2136 | AGI number: AT3G26890.3 uORF ′5 STOP: 236 uORF 3′ STOP: 443 leader length: 603 |
| 2137 | AGI number: AT3G26890.3 uORF ′5 STOP: 360 uORF 3′ STOP: 432 leader length: 603 |
| 2138 | AGI number: AT3G26890.3 uORF ′5 STOP: 360 uORF 3′ STOP: 432 leader length: 603 |
| 2139 | AGI number: AT3G26890.4 uORF ′5 STOP: 123 uORF 3′ STOP: 195 leader length: 366 |
| 2140 | AGI number: AT3G26890.4 uORF ′5 STOP: 123 uORF 3′ STOP: 195 leader length: 366 |
| 2141 | AGI number: AT3G26890.5 uORF ′5 STOP: 101 uORF 3′ STOP: 173 leader length: 344 |
| 2142 | AGI number: AT3G26890.5 uORF ′5 STOP: 101 uORF 3′ STOP: 173 leader length: 344 |
| 2143 | AGI number: AT3G26890.6 uORF ′5 STOP: 551 uORF 3′ STOP: 623 leader length: 794 |
| 2144 | AGI number: AT3G26890.6 uORF ′5 STOP: 551 uORF 3′ STOP: 623 leader length: 794 |
| 2145 | AGI number: AT3G26910.1 uORF ′5 STOP: 90 uORF 3′ STOP: 150 leader length: 273 |
| 2146 | AGI number: AT3G26910.1 uORF ′5 STOP: 90 uORF 3′ STOP: 150 leader length: 273 |
| 2147 | AGI number: AT3G26920.1 uORF ′5 STOP: 137 uORF 3′ STOP: 206 leader length: 568 |
| 2148 | AGI number: AT3G26920.1 uORF ′5 STOP: 137 uORF 3′ STOP: 206 leader length: 568 |
| 2149 | AGI number: AT3G27260.2 uORF ′5 STOP: 48 uORF 3′ STOP: 291 leader length: 601 |
| 2150 | AGI number: AT3G27260.2 uORF ′5 STOP: 48 uORF 3′ STOP: 291 leader length: 601 |
| 2151 | AGI number: AT3G27260.2 uORF ′5 STOP: 191 uORF 3′ STOP: 302 leader length: 601 |
| 2152 | AGI number: AT3G27260.2 uORF ′5 STOP: 191 uORF 3′ STOP: 302 leader length: 601 |
| 2153 | AGI number: AT3G27330.1 uORF ′5 STOP: 75 uORF 3′ STOP: 144 leader length: 129 |
| 2154 | AGI number: AT3G27330.1 uORF ′5 STOP: 75 uORF 3′ STOP: 144 leader length: 129 |
| 2155 | AGI number: AT3G27350.3 uORF ′5 STOP: 370 uORF 3′ STOP: 505 leader length: 700 |
| 2156 | AGI number: AT3G27350.3 uORF ′5 STOP: 370 uORF 3′ STOP: 505 leader length: 700 |
| 2157 | AGI number: AT3G27350.3 uORF ′5 STOP: 447 uORF 3′ STOP: 510 leader length: 700 |
| 2158 | AGI number: AT3G27350.3 uORF ′5 STOP: 447 uORF 3′ STOP: 510 leader length: 700 |
| 2159 | AGI number: AT3G27510.1 uORF ′5 STOP: 1 uORF 3′ STOP: 811 leader length: 781 |
| 2160 | AGI number: AT3G27510.1 uORF ′5 STOP: 1 uORF 3′ STOP: 811 leader length: 781 |
| 2161 | AGI number: AT3G27560.1 uORF ′5 STOP: 70 uORF 3′ STOP: 229 leader length: 497 |
| 2162 | AGI number: AT3G27560.1 uORF ′5 STOP: 70 uORF 3′ STOP: 229 leader length: 497 |
| 2163 | AGI number: AT3G27560.1 uORF ′5 STOP: 89 uORF 3′ STOP: 233 leader length: 497 |
| 2164 | AGI number: AT3G27560.1 uORF ′5 STOP: 89 uORF 3′ STOP: 233 leader length: 497 |
| 2165 | AGI number: AT3G27940.1 uORF ′5 STOP: 111 uORF 3′ STOP: 180 leader length: 175 |
| 2166 | AGI number: AT3G27940.1 uORF ′5 STOP: 111 uORF 3′ STOP: 180 leader length: 175 |
| 2167 | AGI number: AT3G28690.1 uORF ′5 STOP: 447 uORF 3′ STOP: 564 leader length: 963 |
| 2168 | AGI number: AT3G28690.1 uORF ′5 STOP: 447 uORF 3′ STOP: 564 leader length: 963 |
| 2169 | AGI number: AT3G28690.1 uORF ′5 STOP: 120 uORF 3′ STOP: 267 leader length: 963 |
| 2170 | AGI number: AT3G28690.1 uORF ′5 STOP: 120 uORF 3′ STOP: 267 leader length: 963 |
| 2171 | AGI number: AT3G28920.1 uORF ′5 STOP: 64 uORF 3′ STOP: 178 leader length: 297 |
| 2172 | AGI number: AT3G28920.1 uORF ′5 STOP: 64 uORF 3′ STOP: 178 leader length: 297 |
| 2173 | AGI number: AT3G29130.2 uORF ′5 STOP: 50 uORF 3′ STOP: 107 leader length: 59 |
| 2174 | AGI number: AT3G29130.2 uORF ′5 STOP: 50 uORF 3′ STOP: 107 leader length: 59 |
| 2175 | AGI number: AT3G41762.1 uORF ′5 STOP: 18 uORF 3′ STOP: 132 leader length: 139 |
| 2176 | AGI number: AT3G41762.1 uORF ′5 STOP: 18 uORF 3′ STOP: 132 leader length: 139 |
| 2177 | AGI number: AT3G42150.1 uORF ′5 STOP: 237 uORF 3′ STOP: 531 leader length: 249 |
| 2178 | AGI number: AT3G42150.1 uORF ′5 STOP: 237 uORF 3′ STOP: 531 leader length: 249 |
| 2179 | AGI number: AT3G42150.2 uORF ′5 STOP: 34 uORF 3′ STOP: 328 leader length: 46 |
| 2180 | AGI number: AT3G42150.2 uORF ′5 STOP: 34 uORF 3′ STOP: 328 leader length: 46 |
| 2181 | AGI number: AT3G42150.3 uORF ′5 STOP: 22 uORF 3′ STOP: 316 leader length: 34 |
| 2182 | AGI number: AT3G42150.3 uORF ′5 STOP: 22 uORF 3′ STOP: 316 leader length: 34 |
| 2183 | AGI number: AT3G43240.1 uORF ′5 STOP: 54 uORF 3′ STOP: 108 leader length: 302 |
| 2184 | AGI number: AT3G43240.1 uORF ′5 STOP: 54 uORF 3′ STOP: 108 leader length: 302 |
| 2185 | AGI number: AT3G44740.1 uORF ′5 STOP: 106 uORF 3′ STOP: 202 leader length: 118 |
| 2186 | AGI number: AT3G44740.1 uORF ′5 STOP: 106 uORF 3′ STOP: 202 leader length: 118 |
| 2187 | AGI number: AT3G45090.1 uORF ′5 STOP: 35 uORF 3′ STOP: 158 leader length: 229 |
| 2188 | AGI number: AT3G45090.1 uORF ′5 STOP: 35 uORF 3′ STOP: 158 leader length: 229 |
| 2189 | AGI number: AT3G45090.2 uORF ′5 STOP: 83 uORF 3′ STOP: 164 leader length: 280 |
| 2190 | AGI number: AT3G45090.2 uORF ′5 STOP: 83 uORF 3′ STOP: 164 leader length: 280 |
| 2191 | AGI number: AT3G45090.2 uORF ′5 STOP: 34 uORF 3′ STOP: 157 leader length: 280 |
| 2192 | AGI number: AT3G45090.2 uORF ′5 STOP: 34 uORF 3′ STOP: 157 leader length: 280 |
| 2193 | AGI number: AT3G45240.1 uORF ′5 STOP: 148 uORF 3′ STOP: 220 leader length: 748 |
| 2194 | AGI number: AT3G45240.1 uORF ′5 STOP: 148 uORF 3′ STOP: 220 leader length: 748 |
| 2195 | AGI number: AT3G45240.1 uORF ′5 STOP: 260 uORF 3′ STOP: 395 leader length: 748 |
| 2196 | AGI number: AT3G45240.1 uORF ′5 STOP: 260 uORF 3′ STOP: 395 leader length: 748 |
| 2197 | AGI number: AT3G45240.1 uORF ′5 STOP: 319 uORF 3′ STOP: 379 leader length: 748 |
| 2198 | AGI number: AT3G45240.1 uORF ′5 STOP: 319 uORF 3′ STOP: 379 leader length: 748 |
| 2199 | AGI number: AT3G45240.1 uORF ′5 STOP: 437 uORF 3′ STOP: 653 leader length: 748 |
| 2200 | AGI number: AT3G45240.1 uORF ′5 STOP: 437 uORF 3′ STOP: 653 leader length: 748 |
| 2201 | AGI number: AT3G45240.2 uORF ′5 STOP: 147 uORF 3′ STOP: 363 leader length: 458 |
| 2202 | AGI number: AT3G45240.2 uORF ′5 STOP: 147 uORF 3′ STOP: 363 leader length: 458 |
| 2203 | AGI number: AT3G45240.3 uORF ′5 STOP: 102 uORF 3′ STOP: 318 leader length: 413 |
| 2204 | AGI number: AT3G45240.3 uORF ′5 STOP: 102 uORF 3′ STOP: 318 leader length: 413 |
| 2205 | AGI number: AT3G45870.2 uORF ′5 STOP: 91 uORF 3′ STOP: 160 leader length: 354 |
| 2206 | AGI number: AT3G45870.2 uORF ′5 STOP: 91 uORF 3′ STOP: 160 leader length: 354 |
| 2207 | AGI number: AT3G45960.1 uORF ′5 STOP: 96 uORF 3′ STOP: 216 leader length: 302 |
| 2208 | AGI number: AT3G45960.1 uORF ′5 STOP: 96 uORF 3′ STOP: 216 leader length: 302 |
| 2209 | AGI number: AT3G45960.1 uORF ′5 STOP: 227 uORF 3′ STOP: 419 leader length: 302 |
| 2210 | AGI number: AT3G45960.1 uORF ′5 STOP: 227 uORF 3′ STOP: 419 leader length: 302 |
| 2211 | AGI number: AT3G46590.1 uORF ′5 STOP: 120 uORF 3′ STOP: 171 leader length: 376 |
| 2212 | AGI number: AT3G46590.1 uORF ′5 STOP: 120 uORF 3′ STOP: 171 leader length: 376 |
| 2213 | AGI number: AT3G46590.1 uORF ′5 STOP: 100 uORF 3′ STOP: 202 leader length: 376 |
| 2214 | AGI number: AT3G46590.1 uORF ′5 STOP: 100 uORF 3′ STOP: 202 leader length: 376 |
| 2215 | AGI number: AT3G46590.2 uORF ′5 STOP: 100 uORF 3′ STOP: 202 leader length: 376 |
| 2216 | AGI number: AT3G46590.2 uORF ′5 STOP: 100 uORF 3′ STOP: 202 leader length: 376 |
| 2217 | AGI number: AT3G46590.2 uORF ′5 STOP: 120 uORF 3′ STOP: 171 leader length: 376 |
| 2218 | AGI number: AT3G46590.2 uORF ′5 STOP: 120 uORF 3′ STOP: 171 leader length: 376 |
| 2219 | AGI number: AT3G46590.3 uORF ′5 STOP: 100 uORF 3′ STOP: 202 leader length: 376 |
| 2220 | AGI number: AT3G46590.3 uORF ′5 STOP: 100 uORF 3′ STOP: 202 leader length: 376 |
| 2221 | AGI number: AT3G46590.3 uORF ′5 STOP: 120 uORF 3′ STOP: 171 leader length: 376 |
| 2222 | AGI number: AT3G46590.3 uORF ′5 STOP: 120 uORF 3′ STOP: 171 leader length: 376 |
| 2223 | AGI number: AT3G46930.1 uORF ′5 STOP: 252 uORF 3′ STOP: 378 leader length: 416 |
| 2224 | AGI number: AT3G46930.1 uORF ′5 STOP: 252 uORF 3′ STOP: 378 leader length: 416 |
| 2225 | AGI number: AT3G47390.1 uORF ′5 STOP: 180 uORF 3′ STOP: 231 leader length: 382 |
| 2226 | AGI number: AT3G47390.1 uORF ′5 STOP: 180 uORF 3′ STOP: 231 leader length: 382 |
| 2227 | AGI number: AT3G47390.2 uORF ′5 STOP: 180 uORF 3′ STOP: 231 leader length: 382 |
| 2228 | AGI number: AT3G47390.2 uORF ′5 STOP: 180 uORF 3′ STOP: 231 leader length: 382 |
| 2229 | AGI number: AT3G47550.2 uORF ′5 STOP: 88 uORF 3′ STOP: 163 leader length: 383 |
| 2230 | AGI number: AT3G47550.2 uORF ′5 STOP: 88 uORF 3′ STOP: 163 leader length: 383 |
| 2231 | AGI number: AT3G47550.2 uORF ′5 STOP: 93 uORF 3′ STOP: 159 leader length: 383 |
| 2232 | AGI number: AT3G47550.2 uORF ′5 STOP: 93 uORF 3′ STOP: 159 leader length: 383 |
| 2233 | AGI number: AT3G47550.6 uORF ′5 STOP: 53 uORF 3′ STOP: 119 leader length: 343 |
| 2234 | AGI number: AT3G47550.6 uORF ′5 STOP: 53 uORF 3′ STOP: 119 leader length: 343 |
| 2235 | AGI number: AT3G47680.1 uORF ′5 STOP: 302 uORF 3′ STOP: 386 leader length: 652 |
| 2236 | AGI number: AT3G47680.1 uORF ′5 STOP: 302 uORF 3′ STOP: 386 leader length: 652 |
| 2237 | AGI number: AT3G47965.1 uORF ′5 STOP: 41 uORF 3′ STOP: 110 leader length: 200 |
| 2238 | AGI number: AT3G47965.1 uORF ′5 STOP: 41 uORF 3′ STOP: 110 leader length: 200 |
| 2239 | AGI number: AT3G47965.1 uORF ′5 STOP: 60 uORF 3′ STOP: 123 leader length: 200 |
| 2240 | AGI number: AT3G47965.1 uORF ′5 STOP: 60 uORF 3′ STOP: 123 leader length: 200 |
| 2241 | AGI number: AT3G47965.1 uORF ′5 STOP: 110 uORF 3′ STOP: 218 leader length: 200 |
| 2242 | AGI number: AT3G47965.1 uORF ′5 STOP: 110 uORF 3′ STOP: 218 leader length: 200 |
| 2243 | AGI number: AT3G48060.1 uORF ′5 STOP: 261 uORF 3′ STOP: 315 leader length: 294 |
| 2244 | AGI number: AT3G48060.1 uORF ′5 STOP: 261 uORF 3′ STOP: 315 leader length: 294 |
| 2245 | AGI number: AT3G49050.1 uORF ′5 STOP: 6 uORF 3′ STOP: 213 leader length: 530 |
| 2246 | AGI number: AT3G49050.1 uORF ′5 STOP: 6 uORF 3′ STOP: 213 leader length: 530 |
| 2247 | AGI number: AT3G49050.1 uORF ′5 STOP: 106 uORF 3′ STOP: 202 leader length: 530 |
| 2248 | AGI number: AT3G49050.1 uORF ′5 STOP: 106 uORF 3′ STOP: 202 leader length: 530 |
| 2249 | AGI number: AT3G49290.2 uORF ′5 STOP: 150 uORF 3′ STOP: 204 leader length: 334 |
| 2250 | AGI number: AT3G49290.2 uORF ′5 STOP: 150 uORF 3′ STOP: 204 leader length: 334 |
| 2251 | AGI number: AT3G49430.3 uORF ′5 STOP: 109 uORF 3′ STOP: 268 leader length: 445 |
| 2252 | AGI number: AT3G49430.3 uORF ′5 STOP: 109 uORF 3′ STOP: 268 leader length: 445 |
| 2253 | AGI number: AT3G49690.1 uORF ′5 STOP: 23 uORF 3′ STOP: 98 leader length: 206 |
| 2254 | AGI number: AT3G49690.1 uORF ′5 STOP: 23 uORF 3′ STOP: 98 leader length: 206 |
| 2255 | AGI number: AT3G49725.1 uORF ′5 STOP: 11 uORF 3′ STOP: 65 leader length: 60 |
| 2256 | AGI number: AT3G49725.1 uORF ′5 STOP: 11 uORF 3′ STOP: 65 leader length: 60 |
| 2257 | AGI number: AT3G49810.1 uORF ′5 STOP: 180 uORF 3′ STOP: 306 leader length: 552 |
| 2258 | AGI number: AT3G49810.1 uORF ′5 STOP: 180 uORF 3′ STOP: 306 leader length: 552 |
| 2259 | AGI number: AT3G49810.1 uORF ′5 STOP: 254 uORF 3′ STOP: 320 leader length: 552 |
| 2260 | AGI number: AT3G49810.1 uORF ′5 STOP: 254 uORF 3′ STOP: 320 leader length: 552 |
| 2261 | AGI number: AT3G49845.1 uORF ′5 STOP: 62 uORF 3′ STOP: 473 leader length: 81 |
| 2262 | AGI number: AT3G49845.1 uORF ′5 STOP: 62 uORF 3′ STOP: 473 leader length: 81 |
| 2263 | AGI number: AT3G50700.1 uORF ′5 STOP: 377 uORF 3′ STOP: 440 leader length: 534 |
| 2264 | AGI number: AT3G50700.1 uORF ′5 STOP: 377 uORF 3′ STOP: 440 leader length: 534 |
| 2265 | AGI number: AT3G50860.1 uORF ′5 STOP: 64 uORF 3′ STOP: 121 leader length: 349 |
| 2266 | AGI number: AT3G50860.1 uORF ′5 STOP: 64 uORF 3′ STOP: 121 leader length: 349 |
| 2267 | AGI number: AT3G51040.2 uORF ′5 STOP: 331 uORF 3′ STOP: 436 leader length: 620 |
| 2268 | AGI number: AT3G51040.2 uORF ′5 STOP: 331 uORF 3′ STOP: 436 leader length: 620 |
| 2269 | AGI number: AT3G51040.3 uORF ′5 STOP: 108 uORF 3′ STOP: 180 leader length: 374 |
| 2270 | AGI number: AT3G51040.3 uORF ′5 STOP: 108 uORF 3′ STOP: 180 leader length: 374 |
| 2271 | AGI number: AT3G51140.1 uORF ′5 STOP: 26 uORF 3′ STOP: 98 leader length: 332 |
| 2272 | AGI number: AT3G51140.1 uORF ′5 STOP: 26 uORF 3′ STOP: 98 leader length: 332 |
| 2273 | AGI number: AT3G51180.1 uORF ′5 STOP: 52 uORF 3′ STOP: 247 leader length: 330 |
| 2274 | AGI number: AT3G51180.1 uORF ′5 STOP: 52 uORF 3′ STOP: 247 leader length: 330 |
| 2275 | AGI number: AT3G51290.2 uORF ′5 STOP: 118 uORF 3′ STOP: 298 leader length: 468 |
| 2276 | AGI number: AT3G51290.2 uORF ′5 STOP: 118 uORF 3′ STOP: 298 leader length: 468 |
| 2277 | AGI number: AT3G51300.1 uORF ′5 STOP: 69 uORF 3′ STOP: 222 leader length: 310 |
| 2278 | AGI number: AT3G51300.1 uORF ′5 STOP: 69 uORF 3′ STOP: 222 leader length: 310 |
| 2279 | AGI number: AT3G51370.1 uORF ′5 STOP: 118 uORF 3′ STOP: 295 leader length: 454 |
| 2280 | AGI number: AT3G51370.1 uORF ′5 STOP: 118 uORF 3′ STOP: 295 leader length: 454 |
| 2281 | AGI number: AT3G51370.2 uORF ′5 STOP: 436 uORF 3′ STOP: 544 leader length: 566 |
| 2282 | AGI number: AT3G51370.2 uORF ′5 STOP: 436 uORF 3′ STOP: 544 leader length: 566 |
| 2283 | AGI number: AT3G51370.2 uORF ′5 STOP: 228 uORF 3′ STOP: 564 leader length: 566 |
| 2284 | AGI number: AT3G51370.2 uORF ′5 STOP: 228 uORF 3′ STOP: 564 leader length: 566 |
| 2285 | AGI number: AT3G51480.1 uORF ′5 STOP: 25 uORF 3′ STOP: 112 leader length: 482 |
| 2286 | AGI number: AT3G51480.1 uORF ′5 STOP: 25 uORF 3′ STOP: 112 leader length: 482 |
| 2287 | AGI number: AT3G51480.1 uORF ′5 STOP: 242 uORF 3′ STOP: 302 leader length: 482 |
| 2288 | AGI number: AT3G51480.1 uORF ′5 STOP: 242 uORF 3′ STOP: 302 leader length: 482 |
| 2289 | AGI number: AT3G51630.1 uORF ′5 STOP: 289 uORF 3′ STOP: 481 leader length: 580 |
| 2290 | AGI number: AT3G51630.1 uORF ′5 STOP: 289 uORF 3′ STOP: 481 leader length: 580 |
| 2291 | AGI number: AT3G51950.1 uORF ′5 STOP: 321 uORF 3′ STOP: 372 leader length: 539 |
| 2292 | AGI number: AT3G51950.1 uORF ′5 STOP: 321 uORF 3′ STOP: 372 leader length: 539 |
| 2293 | AGI number: AT3G51950.1 uORF ′5 STOP: 203 uORF 3′ STOP: 314 leader length: 539 |
| 2294 | AGI number: AT3G51950.1 uORF ′5 STOP: 203 uORF 3′ STOP: 314 leader length: 539 |
| 2295 | AGI number: AT3G51950.2 uORF ′5 STOP: 183 uORF 3′ STOP: 294 leader length: 519 |
| 2296 | AGI number: AT3G51950.2 uORF ′5 STOP: 183 uORF 3′ STOP: 294 leader length: 519 |
| 2297 | AGI number: AT3G52170.2 uORF ′5 STOP: 26 uORF 3′ STOP: 92 leader length: 187 |
| 2298 | AGI number: AT3G52170.2 uORF ′5 STOP: 26 uORF 3′ STOP: 92 leader length: 187 |
| 2299 | AGI number: AT3G52290.1 uORF ′5 STOP: 119 uORF 3′ STOP: 203 leader length: 348 |
| 2300 | AGI number: AT3G52290.1 uORF ′5 STOP: 119 uORF 3′ STOP: 203 leader length: 348 |
| 2301 | AGI number: AT3G52730.1 uORF ′5 STOP: 33 uORF 3′ STOP: 309 leader length: 97 |
| 2302 | AGI number: AT3G52730.1 uORF ′5 STOP: 33 uORF 3′ STOP: 309 leader length: 97 |
| 2303 | AGI number: AT3G52880.2 uORF ′5 STOP: 6 uORF 3′ STOP: 150 leader length: 88 |
| 2304 | AGI number: AT3G52880.2 uORF ′5 STOP: 6 uORF 3′ STOP: 150 leader length: 88 |
| 2305 | AGI number: AT3G52890.1 uORF ′5 STOP: 348 uORF 3′ STOP: 456 leader length: 719 |
| 2306 | AGI number: AT3G52890.1 uORF ′5 STOP: 348 uORF 3′ STOP: 456 leader length: 719 |
| 2307 | AGI number: AT3G52990.2 uORF ′5 STOP: 66 uORF 3′ STOP: 240 leader length: 456 |
| 2308 | AGI number: AT3G52990.2 uORF ′5 STOP: 66 uORF 3′ STOP: 240 leader length: 456 |
| 2309 | AGI number: AT3G52990.2 uORF ′5 STOP: 137 uORF 3′ STOP: 275 leader length: 456 |
| 2310 | AGI number: AT3G52990.2 uORF ′5 STOP: 137 uORF 3′ STOP: 275 leader length: 456 |
| 2311 | AGI number: AT3G53270.2 uORF ′5 STOP: 217 uORF 3′ STOP: 304 leader length: 462 |
| 2312 | AGI number: AT3G53270.2 uORF ′5 STOP: 217 uORF 3′ STOP: 304 leader length: 462 |
| 2313 | AGI number: AT3G53270.2 uORF ′5 STOP: 236 uORF 3′ STOP: 299 leader length: 462 |
| 2314 | AGI number: AT3G53270.2 uORF ′5 STOP: 236 uORF 3′ STOP: 299 leader length: 462 |
| 2315 | AGI number: AT3G53500.1 uORF ′5 STOP: 153 uORF 3′ STOP: 285 leader length: 498 |
| 2316 | AGI number: AT3G53500.1 uORF ′5 STOP: 153 uORF 3′ STOP: 285 leader length: 498 |
| 2317 | AGI number: AT3G53500.1 uORF ′5 STOP: 300 uORF 3′ STOP: 351 leader length: 498 |
| 2318 | AGI number: AT3G53500.1 uORF ′5 STOP: 300 uORF 3′ STOP: 351 leader length: 498 |
| 2319 | AGI number: AT3G53500.1 uORF ′5 STOP: 62 uORF 3′ STOP: 323 leader length: 498 |
| 2320 | AGI number: AT3G53500.1 uORF ′5 STOP: 62 uORF 3′ STOP: 323 leader length: 498 |
| 2321 | AGI number: AT3G53668.1 uORF ′5 STOP: 49 uORF 3′ STOP: 124 leader length: 287 |
| 2322 | AGI number: AT3G53668.1 uORF ′5 STOP: 49 uORF 3′ STOP: 124 leader length: 287 |
| 2323 | AGI number: AT3G53668.1 uORF ′5 STOP: 57 uORF 3′ STOP: 135 leader length: 287 |
| 2324 | AGI number: AT3G53668.1 uORF ′5 STOP: 57 uORF 3′ STOP: 135 leader length: 287 |
| 2325 | AGI number: AT3G53670.1 uORF ′5 STOP: 174 uORF 3′ STOP: 414 leader length: 596 |
| 2326 | AGI number: AT3G53670.1 uORF ′5 STOP: 174 uORF 3′ STOP: 414 leader length: 596 |
| 2327 | AGI number: AT3G53670.1 uORF ′5 STOP: 57 uORF 3′ STOP: 135 leader length: 596 |
| 2328 | AGI number: AT3G53670.1 uORF ′5 STOP: 57 uORF 3′ STOP: 135 leader length: 596 |
| 2329 | AGI number: AT3G53670.1 uORF ′5 STOP: 49 uORF 3′ STOP: 124 leader length: 596 |
| 2330 | AGI number: AT3G53670.1 uORF ′5 STOP: 49 uORF 3′ STOP: 124 leader length: 596 |
| 2331 | AGI number: AT3G53670.2 uORF ′5 STOP: 106 uORF 3′ STOP: 181 leader length: 549 |
| 2332 | AGI number: AT3G53670.2 uORF ′5 STOP: 106 uORF 3′ STOP: 181 leader length: 549 |
| 2333 | AGI number: AT3G53670.2 uORF ′5 STOP: 114 uORF 3′ STOP: 192 leader length: 549 |
| 2334 | AGI number: AT3G53670.2 uORF ′5 STOP: 114 uORF 3′ STOP: 192 leader length: 549 |
| 2335 | AGI number: AT3G53850.1 uORF ′5 STOP: 93 uORF 3′ STOP: 186 leader length: 294 |
| 2336 | AGI number: AT3G53850.1 uORF ′5 STOP: 93 uORF 3′ STOP: 186 leader length: 294 |
| 2337 | AGI number: AT3G53850.1 uORF ′5 STOP: 89 uORF 3′ STOP: 206 leader length: 294 |
| 2338 | AGI number: AT3G53850.1 uORF ′5 STOP: 89 uORF 3′ STOP: 206 leader length: 294 |
| 2339 | AGI number: AT3G54010.2 uORF ′5 STOP: 250 uORF 3′ STOP: 316 leader length: 521 |
| 2340 | AGI number: AT3G54010.2 uORF ′5 STOP: 250 uORF 3′ STOP: 316 leader length: 521 |
| 2341 | AGI number: AT3G54190.1 uORF ′5 STOP: 79 uORF 3′ STOP: 157 leader length: 274 |
| 2342 | AGI number: AT3G54190.1 uORF ′5 STOP: 79 uORF 3′ STOP: 157 leader length: 274 |
| 2343 | AGI number: AT3G54220.1 uORF ′5 STOP: 278 uORF 3′ STOP: 440 leader length: 392 |
| 2344 | AGI number: AT3G54220.1 uORF ′5 STOP: 278 uORF 3′ STOP: 440 leader length: 392 |
| 2345 | AGI number: AT3G54350.3 uORF ′5 STOP: 22 uORF 3′ STOP: 157 leader length: 245 |
| 2346 | AGI number: AT3G54350.3 uORF ′5 STOP: 22 uORF 3′ STOP: 157 leader length: 245 |
| 2347 | AGI number: AT3G54350.3 uORF ′5 STOP: 44 uORF 3′ STOP: 161 leader length: 245 |
| 2348 | AGI number: AT3G54350.3 uORF ′5 STOP: 44 uORF 3′ STOP: 161 leader length: 245 |
| 2349 | AGI number: AT3G54380.3 uORF ′5 STOP: 257 uORF 3′ STOP: 464 leader length: 530 |
| 2350 | AGI number: AT3G54380.3 uORF ′5 STOP: 257 uORF 3′ STOP: 464 leader length: 530 |
| 2351 | AGI number: AT3G55020.1 uORF ′5 STOP: 47 uORF 3′ STOP: 125 leader length: 198 |
| 2352 | AGI number: AT3G55020.1 uORF ′5 STOP: 47 uORF 3′ STOP: 125 leader length: 198 |
| 2353 | AGI number: AT3G55050.1 uORF ′5 STOP: 102 uORF 3′ STOP: 303 leader length: 314 |
| 2354 | AGI number: AT3G55050.1 uORF ′5 STOP: 102 uORF 3′ STOP: 303 leader length: 314 |
| 2355 | AGI number: AT3G55080.2 uORF ′5 STOP: 60 uORF 3′ STOP: 258 leader length: 341 |
| 2356 | AGI number: AT3G55080.2 uORF ′5 STOP: 60 uORF 3′ STOP: 258 leader length: 341 |
| 2357 | AGI number: AT3G55080.2 uORF ′5 STOP: 161 uORF 3′ STOP: 269 leader length: 341 |
| 2358 | AGI number: AT3G55080.2 uORF ′5 STOP: 161 uORF 3′ STOP: 269 leader length: 341 |
| 2359 | AGI number: AT3G55140.2 uORF ′5 STOP: 69 uORF 3′ STOP: 168 leader length: 277 |
| 2360 | AGI number: AT3G55140.2 uORF ′5 STOP: 69 uORF 3′ STOP: 168 leader length: 277 |
| 2361 | AGI number: AT3G55140.2 uORF ′5 STOP: 83 uORF 3′ STOP: 179 leader length: 277 |
| 2362 | AGI number: AT3G55140.2 uORF ′5 STOP: 83 uORF 3′ STOP: 179 leader length: 277 |
| 2363 | AGI number: AT3G55480.1 uORF ′5 STOP: 328 uORF 3′ STOP: 379 leader length: 533 |
| 2364 | AGI number: AT3G55480.1 uORF ′5 STOP: 328 uORF 3′ STOP: 379 leader length: 533 |
| 2365 | AGI number: AT3G55560.1 uORF ′5 STOP: 147 uORF 3′ STOP: 222 leader length: 367 |
| 2366 | AGI number: AT3G55560.1 uORF ′5 STOP: 147 uORF 3′ STOP: 222 leader length: 367 |
| 2367 | AGI number: AT3G55560.1 uORF ′5 STOP: 133 uORF 3′ STOP: 217 leader length: 367 |
| 2368 | AGI number: AT3G55560.1 uORF ′5 STOP: 133 uORF 3′ STOP: 217 leader length: 367 |
| 2369 | AGI number: AT3G55560.1 uORF ′5 STOP: 158 uORF 3′ STOP: 230 leader length: 367 |
| 2370 | AGI number: AT3G55560.1 uORF ′5 STOP: 158 uORF 3′ STOP: 230 leader length: 367 |
| 2371 | AGI number: AT3G55820.1 uORF ′5 STOP: 311 uORF 3′ STOP: 458 leader length: 332 |
| 2372 | AGI number: AT3G55820.1 uORF ′5 STOP: 311 uORF 3′ STOP: 458 leader length: 332 |
| 2373 | AGI number: AT3G55850.2 uORF ′5 STOP: 40 uORF 3′ STOP: 130 leader length: 285 |
| 2374 | AGI number: AT3G55850.2 uORF ′5 STOP: 40 uORF 3′ STOP: 130 leader length: 285 |
| 2375 | AGI number: AT3G55850.2 uORF ′5 STOP: 66 uORF 3′ STOP: 135 leader length: 285 |
| 2376 | AGI number: AT3G55850.2 uORF ′5 STOP: 66 uORF 3′ STOP: 135 leader length: 285 |
| 2377 | AGI number: AT3G55860.1 uORF ′5 STOP: 39 uORF 3′ STOP: 120 leader length: 656 |
| 2378 | AGI number: AT3G55860.1 uORF ′5 STOP: 39 uORF 3′ STOP: 120 leader length: 656 |
| 2379 | AGI number: AT3G55860.1 uORF ′5 STOP: 5 uORF 3′ STOP: 104 leader length: 656 |
| 2380 | AGI number: AT3G55860.1 uORF ′5 STOP: 5 uORF 3′ STOP: 104 leader length: 656 |
| 2381 | AGI number: AT3G56130.2 uORF ′5 STOP: 9 uORF 3′ STOP: 510 leader length: 629 |
| 2382 | AGI number: AT3G56130.2 uORF ′5 STOP: 9 uORF 3′ STOP: 510 leader length: 629 |
| 2383 | AGI number: AT3G56130.2 uORF ′5 STOP: 416 uORF 3′ STOP: 503 leader length: 629 |
| 2384 | AGI number: AT3G56130.2 uORF ′5 STOP: 416 uORF 3′ STOP: 503 leader length: 629 |
| 2385 | AGI number: AT3G56130.2 uORF ′5 STOP: 394 uORF 3′ STOP: 454 leader length: 629 |
| 2386 | AGI number: AT3G56130.2 uORF ′5 STOP: 394 uORF 3′ STOP: 454 leader length: 629 |
| 2387 | AGI number: AT3G56130.3 uORF ′5 STOP: 416 uORF 3′ STOP: 503 leader length: 666 |
| 2388 | AGI number: AT3G56130.3 uORF ′5 STOP: 416 uORF 3′ STOP: 503 leader length: 666 |
| 2389 | AGI number: AT3G56130.3 uORF ′5 STOP: 9 uORF 3′ STOP: 510 leader length: 666 |
| 2390 | AGI number: AT3G56130.3 uORF ′5 STOP: 9 uORF 3′ STOP: 510 leader length: 666 |
| 2391 | AGI number: AT3G56130.3 uORF ′5 STOP: 394 uORF 3′ STOP: 454 leader length: 666 |
| 2392 | AGI number: AT3G56130.3 uORF ′5 STOP: 394 uORF 3′ STOP: 454 leader length: 666 |
| 2393 | AGI number: AT3G56270.1 uORF ′5 STOP: 129 uORF 3′ STOP: 216 leader length: 220 |
| 2394 | AGI number: AT3G56270.1 uORF ′5 STOP: 129 uORF 3′ STOP: 216 leader length: 220 |
| 2395 | AGI number: AT3G56580.1 uORF ′5 STOP: 12 uORF 3′ STOP: 237 leader length: 341 |
| 2396 | AGI number: AT3G56580.1 uORF ′5 STOP: 12 uORF 3′ STOP: 237 leader length: 341 |
| 2397 | AGI number: AT3G56580.1 uORF ′5 STOP: 160 uORF 3′ STOP: 274 leader length: 341 |
| 2398 | AGI number: AT3G56580.1 uORF ′5 STOP: 160 uORF 3′ STOP: 274 leader length: 341 |
| 2399 | AGI number: AT3G56580.2 uORF ′5 STOP: 77 uORF 3′ STOP: 128 leader length: 215 |
| 2400 | AGI number: AT3G56580.2 uORF ′5 STOP: 77 uORF 3′ STOP: 128 leader length: 215 |
| 2401 | AGI number: AT3G56850.1 uORF ′5 STOP: 327 uORF 3′ STOP: 498 leader length: 622 |
| 2402 | AGI number: AT3G56850.1 uORF ′5 STOP: 327 uORF 3′ STOP: 498 leader length: 622 |
| 2403 | AGI number: AT3G56850.1 uORF ′5 STOP: 466 uORF 3′ STOP: 544 leader length: 622 |
| 2404 | AGI number: AT3G56850.1 uORF ′5 STOP: 466 uORF 3′ STOP: 544 leader length: 622 |
| 2405 | AGI number: AT3G56850.1 uORF ′5 STOP: 410 uORF 3′ STOP: 509 leader length: 622 |
| 2406 | AGI number: AT3G56850.1 uORF ′5 STOP: 410 uORF 3′ STOP: 509 leader length: 622 |
| 2407 | AGI number: AT3G56850.1 uORF ′5 STOP: 108 uORF 3′ STOP: 198 leader length: 622 |
| 2408 | AGI number: AT3G56850.1 uORF ′5 STOP: 108 uORF 3′ STOP: 198 leader length: 622 |
| 2409 | AGI number: AT3G57630.1 uORF ′5 STOP: 34 uORF 3′ STOP: 136 leader length: 290 |
| 2410 | AGI number: AT3G57630.1 uORF ′5 STOP: 34 uORF 3′ STOP: 136 leader length: 290 |
| 2411 | AGI number: AT3G57790.1 uORF ′5 STOP: 30 uORF 3′ STOP: 177 leader length: 294 |
| 2412 | AGI number: AT3G57790.1 uORF ′5 STOP: 30 uORF 3′ STOP: 177 leader length: 294 |
| 2413 | AGI number: AT3G57790.1 uORF ′5 STOP: 101 uORF 3′ STOP: 164 leader length: 294 |
| 2414 | AGI number: AT3G57790.1 uORF ′5 STOP: 101 uORF 3′ STOP: 164 leader length: 294 |
| 2415 | AGI number: AT3G58030.2 uORF ′5 STOP: 226 uORF 3′ STOP: 361 leader length: 469 |
| 2416 | AGI number: AT3G58030.2 uORF ′5 STOP: 226 uORF 3′ STOP: 361 leader length: 469 |
| 2417 | AGI number: AT3G58510.2 uORF ′5 STOP: 73 uORF 3′ STOP: 127 leader length: 339 |
| 2418 | AGI number: AT3G58510.2 uORF ′5 STOP: 73 uORF 3′ STOP: 127 leader length: 339 |
| 2419 | AGI number: AT3G58520.2 uORF ′5 STOP: 8 uORF 3′ STOP: 119 leader length: 209 |
| 2420 | AGI number: AT3G58520.2 uORF ′5 STOP: 8 uORF 3′ STOP: 119 leader length: 209 |
| 2421 | AGI number: AT3G58560.1 uORF ′5 STOP: 117 uORF 3′ STOP: 177 leader length: 304 |
| 2422 | AGI number: AT3G58560.1 uORF ′5 STOP: 117 uORF 3′ STOP: 177 leader length: 304 |
| 2423 | AGI number: AT3G58650.1 uORF ′5 STOP: 259 uORF 3′ STOP: 334 leader length: 567 |
| 2424 | AGI number: AT3G58650.1 uORF ′5 STOP: 259 uORF 3′ STOP: 334 leader length: 567 |
| 2425 | AGI number: AT3G58650.1 uORF ′5 STOP: 267 uORF 3′ STOP: 339 leader length: 567 |
| 2426 | AGI number: AT3G58650.1 uORF ′5 STOP: 267 uORF 3′ STOP: 339 leader length: 567 |
| 2427 | AGI number: AT3G58670.3 uORF ′5 STOP: 29 uORF 3′ STOP: 143 leader length: 452 |
| 2428 | AGI number: AT3G58670.3 uORF ′5 STOP: 29 uORF 3′ STOP: 143 leader length: 452 |
| 2429 | AGI number: AT3G59470.1 uORF ′5 STOP: 98 uORF 3′ STOP: 167 leader length: 447 |
| 2430 | AGI number: AT3G59470.1 uORF ′5 STOP: 98 uORF 3′ STOP: 167 leader length: 447 |
| 2431 | AGI number: AT3G59470.1 uORF ′5 STOP: 270 uORF 3′ STOP: 333 leader length: 447 |
| 2432 | AGI number: AT3G59470.1 uORF ′5 STOP: 270 uORF 3′ STOP: 333 leader length: 447 |
| 2433 | AGI number: AT3G59570.1 uORF ′5 STOP: 213 uORF 3′ STOP: 423 leader length: 270 |
| 2434 | AGI number: AT3G59570.1 uORF ′5 STOP: 213 uORF 3′ STOP: 423 leader length: 270 |
| 2435 | AGI number: AT3G59570.1 uORF ′5 STOP: 9 uORF 3′ STOP: 204 leader length: 270 |
| 2436 | AGI number: AT3G59570.1 uORF ′5 STOP: 9 uORF 3′ STOP: 204 leader length: 270 |
| 2437 | AGI number: AT3G59770.2 uORF ′5 STOP: 559 uORF 3′ STOP: 751 leader length: 915 |
| 2438 | AGI number: AT3G59770.2 uORF ′5 STOP: 559 uORF 3′ STOP: 751 leader length: 915 |
| 2439 | AGI number: AT3G59770.2 uORF ′5 STOP: 111 uORF 3′ STOP: 759 leader length: 915 |
| 2440 | AGI number: AT3G59770.2 uORF ′5 STOP: 111 uORF 3′ STOP: 759 leader length: 915 |
| 2441 | AGI number: AT3G60240.4 uORF ′5 STOP: 19 uORF 3′ STOP: 106 leader length: 192 |
| 2442 | AGI number: AT3G60240.4 uORF ′5 STOP: 19 uORF 3′ STOP: 106 leader length: 192 |
| 2443 | AGI number: AT3G60240.4 uORF ′5 STOP: 29 uORF 3′ STOP: 98 leader length: 192 |
| 2444 | AGI number: AT3G60240.4 uORF ′5 STOP: 29 uORF 3′ STOP: 98 leader length: 192 |
| 2445 | AGI number: AT3G60540.1 uORF ′5 STOP: 17 uORF 3′ STOP: 122 leader length: 66 |
| 2446 | AGI number: AT3G60540.1 uORF ′5 STOP: 17 uORF 3′ STOP: 122 leader length: 66 |
| 2447 | AGI number: AT3G60540.2 uORF ′5 STOP: 439 uORF 3′ STOP: 544 leader length: 488 |
| 2448 | AGI number: AT3G60540.2 uORF ′5 STOP: 439 uORF 3′ STOP: 544 leader length: 488 |
| 2449 | AGI number: AT3G60540.2 uORF ′5 STOP: 479 uORF 3′ STOP: 710 leader length: 488 |
| 2450 | AGI number: AT3G60540.2 uORF ′5 STOP: 479 uORF 3′ STOP: 710 leader length: 488 |
| 2451 | AGI number: AT3G60800.1 uORF ′5 STOP: 28 uORF 3′ STOP: 130 leader length: 319 |
| 2452 | AGI number: AT3G60800.1 uORF ′5 STOP: 28 uORF 3′ STOP: 130 leader length: 319 |
| 2453 | AGI number: AT3G60800.1 uORF ′5 STOP: 15 uORF 3′ STOP: 168 leader length: 319 |
| 2454 | AGI number: AT3G60800.1 uORF ′5 STOP: 15 uORF 3′ STOP: 168 leader length: 319 |
| 2455 | AGI number: AT3G61160.1 uORF ′5 STOP: 69 uORF 3′ STOP: 168 leader length: 328 |
| 2456 | AGI number: AT3G61160.1 uORF ′5 STOP: 69 uORF 3′ STOP: 168 leader length: 328 |
| 2457 | AGI number: AT3G61160.2 uORF ′5 STOP: 11 uORF 3′ STOP: 110 leader length: 270 |
| 2458 | AGI number: AT3G61160.2 uORF ′5 STOP: 11 uORF 3′ STOP: 110 leader length: 270 |
| 2459 | AGI number: AT3G61160.2 uORF ′5 STOP: 66 uORF 3′ STOP: 144 leader length: 270 |
| 2460 | AGI number: AT3G61160.2 uORF ′5 STOP: 66 uORF 3′ STOP: 144 leader length: 270 |
| 2461 | AGI number: AT3G61160.2 uORF ′5 STOP: 107 uORF 3′ STOP: 182 leader length: 270 |
| 2462 | AGI number: AT3G61160.2 uORF ′5 STOP: 107 uORF 3′ STOP: 182 leader length: 270 |
| 2463 | AGI number: AT3G61250.1 uORF ′5 STOP: 117 uORF 3′ STOP: 219 leader length: 304 |
| 2464 | AGI number: AT3G61250.1 uORF ′5 STOP: 117 uORF 3′ STOP: 219 leader length: 304 |
| 2465 | AGI number: AT3G61250.1 uORF ′5 STOP: 61 uORF 3′ STOP: 208 leader length: 304 |
| 2466 | AGI number: AT3G61250.1 uORF ′5 STOP: 61 uORF 3′ STOP: 208 leader length: 304 |
| 2467 | AGI number: AT3G61310.1 uORF ′5 STOP: 33 uORF 3′ STOP: 111 leader length: 389 |
| 2468 | AGI number: AT3G61310.1 uORF ′5 STOP: 33 uORF 3′ STOP: 111 leader length: 389 |
| 2469 | AGI number: AT3G61530.2 uORF ′5 STOP: 9 uORF 3′ STOP: 318 leader length: 385 |
| 2470 | AGI number: AT3G61530.2 uORF ′5 STOP: 9 uORF 3′ STOP: 318 leader length: 385 |
| 2471 | AGI number: AT3G61530.2 uORF ′5 STOP: 248 uORF 3′ STOP: 326 leader length: 385 |
| 2472 | AGI number: AT3G61530.2 uORF ′5 STOP: 248 uORF 3′ STOP: 326 leader length: 385 |
| 2473 | AGI number: AT3G61550.1 uORF ′5 STOP: 22 uORF 3′ STOP: 112 leader length: 43 |
| 2474 | AGI number: AT3G61550.1 uORF ′5 STOP: 22 uORF 3′ STOP: 112 leader length: 43 |
| 2475 | AGI number: AT3G61590.1 uORF ′5 STOP: 126 uORF 3′ STOP: 264 leader length: 419 |
| 2476 | AGI number: AT3G61590.1 uORF ′5 STOP: 126 uORF 3′ STOP: 264 leader length: 419 |
| 2477 | AGI number: AT3G61590.1 uORF ′5 STOP: 214 uORF 3′ STOP: 286 leader length: 419 |
| 2478 | AGI number: AT3G61590.1 uORF ′5 STOP: 214 uORF 3′ STOP: 286 leader length: 419 |
| 2479 | AGI number: AT3G61620.2 uORF ′5 STOP: 86 uORF 3′ STOP: 215 leader length: 340 |
| 2480 | AGI number: AT3G61620.2 uORF ′5 STOP: 86 uORF 3′ STOP: 215 leader length: 340 |
| 2481 | AGI number: AT3G61680.1 uORF ′5 STOP: 120 uORF 3′ STOP: 273 leader length: 358 |
| 2482 | AGI number: AT3G61680.1 uORF ′5 STOP: 120 uORF 3′ STOP: 273 leader length: 358 |
| 2483 | AGI number: AT3G61680.1 uORF ′5 STOP: 97 uORF 3′ STOP: 265 leader length: 358 |
| 2484 | AGI number: AT3G61680.1 uORF ′5 STOP: 97 uORF 3′ STOP: 265 leader length: 358 |
| 2485 | AGI number: AT3G61830.1 uORF ′5 STOP: 53 uORF 3′ STOP: 185 leader length: 282 |
| 2486 | AGI number: AT3G61830.1 uORF ′5 STOP: 53 uORF 3′ STOP: 185 leader length: 282 |
| 2487 | AGI number: AT3G61850.2 uORF ′5 STOP: 41 uORF 3′ STOP: 332 leader length: 693 |
| 2488 | AGI number: AT3G61850.2 uORF ′5 STOP: 41 uORF 3′ STOP: 332 leader length: 693 |
| 2489 | AGI number: AT3G62020.2 uORF ′5 STOP: 5 uORF 3′ STOP: 122 leader length: 221 |
| 2490 | AGI number: AT3G62020.2 uORF ′5 STOP: 5 uORF 3′ STOP: 122 leader length: 221 |
| 2491 | AGI number: AT3G62190.2 uORF ′5 STOP: 54 uORF 3′ STOP: 291 leader length: 106 |
| 2492 | AGI number: AT3G62190.2 uORF ′5 STOP: 54 uORF 3′ STOP: 291 leader length: 106 |
| 2493 | AGI number: AT3G62270.1 uORF ′5 STOP: 222 uORF 3′ STOP: 288 leader length: 415 |
| 2494 | AGI number: AT3G62270.1 uORF ′5 STOP: 222 uORF 3′ STOP: 288 leader length: 415 |
| 2495 | AGI number: AT3G62270.1 uORF ′5 STOP: 164 uORF 3′ STOP: 254 leader length: 415 |
| 2496 | AGI number: AT3G62270.1 uORF ′5 STOP: 164 uORF 3′ STOP: 254 leader length: 415 |
| 2497 | AGI number: AT3G62270.1 uORF ′5 STOP: 235 uORF 3′ STOP: 301 leader length: 415 |
| 2498 | AGI number: AT3G62270.1 uORF ′5 STOP: 235 uORF 3′ STOP: 301 leader length: 415 |
| 2499 | AGI number: AT3G62400.1 uORF ′5 STOP: 77 uORF 3′ STOP: 281 leader length: 203 |
| 2500 | AGI number: AT3G62400.1 uORF ′5 STOP: 77 uORF 3′ STOP: 281 leader length: 203 |
| 2501 | AGI number: AT3G62400.2 uORF ′5 STOP: 66 uORF 3′ STOP: 270 leader length: 192 |
| 2502 | AGI number: AT3G62400.2 uORF ′5 STOP: 66 uORF 3′ STOP: 270 leader length: 192 |
| 2503 | AGI number: AT3G62420.1 uORF ′5 STOP: 291 uORF 3′ STOP: 390 leader length: 566 |
| 2504 | AGI number: AT3G62420.1 uORF ′5 STOP: 291 uORF 3′ STOP: 390 leader length: 566 |
| 2505 | AGI number: AT3G62420.1 uORF ′5 STOP: 299 uORF 3′ STOP: 419 leader length: 566 |
| 2506 | AGI number: AT3G62420.1 uORF ′5 STOP: 299 uORF 3′ STOP: 419 leader length: 566 |
| 2507 | AGI number: AT3G62420.1 uORF ′5 STOP: 268 uORF 3′ STOP: 385 leader length: 566 |
| 2508 | AGI number: AT3G62420.1 uORF ′5 STOP: 268 uORF 3′ STOP: 385 leader length: 566 |
| 2509 | AGI number: AT3G62422.1 uORF ′5 STOP: 291 uORF 3′ STOP: 390 leader length: 297 |
| 2510 | AGI number: AT3G62422.1 uORF ′5 STOP: 291 uORF 3′ STOP: 390 leader length: 297 |
| 2511 | AGI number: AT3G62660.1 uORF ′5 STOP: 126 uORF 3′ STOP: 246 leader length: 613 |
| 2512 | AGI number: AT3G62660.1 uORF ′5 STOP: 126 uORF 3′ STOP: 246 leader length: 613 |
| 2513 | AGI number: AT3G62660.1 uORF ′5 STOP: 146 uORF 3′ STOP: 278 leader length: 613 |
| 2514 | AGI number: AT3G62660.1 uORF ′5 STOP: 146 uORF 3′ STOP: 278 leader length: 613 |
| 2515 | AGI number: AT3G63050.1 uORF ′5 STOP: 4 uORF 3′ STOP: 73 leader length: 17 |
| 2516 | AGI number: AT3G63050.1 uORF ′5 STOP: 4 uORF 3′ STOP: 73 leader length: 17 |
| 2517 | AGI number: AT3G63080.1 uORF ′5 STOP: 115 uORF 3′ STOP: 217 leader length: 424 |
| 2518 | AGI number: AT3G63080.1 uORF ′5 STOP: 115 uORF 3′ STOP: 217 leader length: 424 |
| 2519 | AGI number: AT3G63130.1 uORF ′5 STOP: 43 uORF 3′ STOP: 127 leader length: 234 |
| 2520 | AGI number: AT3G63130.1 uORF ′5 STOP: 43 uORF 3′ STOP: 127 leader length: 234 |
| 2521 | AGI number: AT3G63130.2 uORF ′5 STOP: 55 uORF 3′ STOP: 139 leader length: 243 |
| 2522 | AGI number: AT3G63130.2 uORF ′5 STOP: 55 uORF 3′ STOP: 139 leader length: 243 |
| 2523 | AGI number: AT3G63210.1 uORF ′5 STOP: 167 uORF 3′ STOP: 230 leader length: 254 |
| 2524 | AGI number: AT3G63210.1 uORF ′5 STOP: 167 uORF 3′ STOP: 230 leader length: 254 |
| 2525 | AGI number: AT3G63240.1 uORF ′5 STOP: 24 uORF 3′ STOP: 255 leader length: 716 |
| 2526 | AGI number: AT3G63240.1 uORF ′5 STOP: 24 uORF 3′ STOP: 255 leader length: 716 |
| 2527 | AGI number: AT3G63250.2 uORF ′5 STOP: 94 uORF 3′ STOP: 202 leader length: 642 |
| 2528 | AGI number: AT3G63250.2 uORF ′5 STOP: 94 uORF 3′ STOP: 202 leader length: 642 |
| 2529 | AGI number: AT3G63250.2 uORF ′5 STOP: 47 uORF 3′ STOP: 209 leader length: 642 |
| 2530 | AGI number: AT3G63250.2 uORF ′5 STOP: 47 uORF 3′ STOP: 209 leader length: 642 |
| 2531 | AGI number: AT3G63450.3 uORF ′5 STOP: 25 uORF 3′ STOP: 109 leader length: 290 |
| 2532 | AGI number: AT3G63450.3 uORF ′5 STOP: 25 uORF 3′ STOP: 109 leader length: 290 |
| 2533 | AGI number: AT3G66654.2 uORF ′5 STOP: 173 uORF 3′ STOP: 245 leader length: 429 |
| 2534 | AGI number: AT3G66654.2 uORF ′5 STOP: 173 uORF 3′ STOP: 245 leader length: 429 |
| 2535 | AGI number: AT3G66654.2 uORF ′5 STOP: 187 uORF 3′ STOP: 238 leader length: 429 |
| 2536 | AGI number: AT3G66654.2 uORF ′5 STOP: 187 uORF 3′ STOP: 238 leader length: 429 |
| 2537 | AGI number: AT3G66654.3 uORF ′5 STOP: 97 uORF 3′ STOP: 229 leader length: 571 |
| 2538 | AGI number: AT3G66654.3 uORF ′5 STOP: 97 uORF 3′ STOP: 229 leader length: 571 |
| 2539 | AGI number: AT4G00110.1 uORF ′5 STOP: 40 uORF 3′ STOP: 100 leader length: 195 |
| 2540 | AGI number: AT4G00110.1 uORF ′5 STOP: 40 uORF 3′ STOP: 100 leader length: 195 |
| 2541 | AGI number: AT4G00130.1 uORF ′5 STOP: 74 uORF 3′ STOP: 134 leader length: 148 |
| 2542 | AGI number: AT4G00130.1 uORF ′5 STOP: 74 uORF 3′ STOP: 134 leader length: 148 |
| 2543 | AGI number: AT4G00180.2 uORF ′5 STOP: 276 uORF 3′ STOP: 414 leader length: 496 |
| 2544 | AGI number: AT4G00180.2 uORF ′5 STOP: 276 uORF 3′ STOP: 414 leader length: 496 |
| 2545 | AGI number: AT4G00390.1 uORF ′5 STOP: 39 uORF 3′ STOP: 150 leader length: 99 |
| 2546 | AGI number: AT4G00390.1 uORF ′5 STOP: 39 uORF 3′ STOP: 150 leader length: 99 |
| 2547 | AGI number: AT4G00440.1 uORF ′5 STOP: 358 uORF 3′ STOP: 490 leader length: 846 |
| 2548 | AGI number: AT4G00440.1 uORF ′5 STOP: 358 uORF 3′ STOP: 490 leader length: 846 |
| 2549 | AGI number: AT4G00440.1 uORF ′5 STOP: 470 uORF 3′ STOP: 728 leader length: 846 |
| 2550 | AGI number: AT4G00440.1 uORF ′5 STOP: 470 uORF 3′ STOP: 728 leader length: 846 |
| 2551 | AGI number: AT4G00440.1 uORF ′5 STOP: 598 uORF 3′ STOP: 721 leader length: 846 |
| 2552 | AGI number: AT4G00440.1 uORF ′5 STOP: 598 uORF 3′ STOP: 721 leader length: 846 |
| 2553 | AGI number: AT4G00440.2 uORF ′5 STOP: 145 uORF 3′ STOP: 238 leader length: 846 |
| 2554 | AGI number: AT4G00440.2 uORF ′5 STOP: 145 uORF 3′ STOP: 238 leader length: 846 |
| 2555 | AGI number: AT4G00440.2 uORF ′5 STOP: 299 uORF 3′ STOP: 473 leader length: 846 |
| 2556 | AGI number: AT4G00440.2 uORF ′5 STOP: 299 uORF 3′ STOP: 473 leader length: 846 |
| 2557 | AGI number: AT4G00440.2 uORF ′5 STOP: 358 uORF 3′ STOP: 490 leader length: 846 |
| 2558 | AGI number: AT4G00440.2 uORF ′5 STOP: 358 uORF 3′ STOP: 490 leader length: 846 |
| 2559 | AGI number: AT4G00440.3 uORF ′5 STOP: 299 uORF 3′ STOP: 473 leader length: 846 |
| 2560 | AGI number: AT4G00440.3 uORF ′5 STOP: 299 uORF 3′ STOP: 473 leader length: 846 |
| 2561 | AGI number: AT4G00440.3 uORF ′5 STOP: 358 uORF 3′ STOP: 490 leader length: 846 |
| 2562 | AGI number: AT4G00440.3 uORF ′5 STOP: 358 uORF 3′ STOP: 490 leader length: 846 |
| 2563 | AGI number: AT4G00440.3 uORF ′5 STOP: 414 uORF 3′ STOP: 525 leader length: 846 |
| 2564 | AGI number: AT4G00440.3 uORF ′5 STOP: 414 uORF 3′ STOP: 525 leader length: 846 |
| 2565 | AGI number: AT4G00500.1 uORF ′5 STOP: 91 uORF 3′ STOP: 151 leader length: 240 |
| 2566 | AGI number: AT4G00500.1 uORF ′5 STOP: 91 uORF 3′ STOP: 151 leader length: 240 |
| 2567 | AGI number: AT4G00500.2 uORF ′5 STOP: 68 uORF 3′ STOP: 128 leader length: 217 |
| 2568 | AGI number: AT4G00500.2 uORF ′5 STOP: 68 uORF 3′ STOP: 128 leader length: 217 |
| 2569 | AGI number: AT4G00550.1 uORF ′5 STOP: 87 uORF 3′ STOP: 147 leader length: 282 |
| 2570 | AGI number: AT4G00550.1 uORF ′5 STOP: 87 uORF 3′ STOP: 147 leader length: 282 |
| 2571 | AGI number: AT4G00710.1 uORF ′5 STOP: 303 uORF 3′ STOP: 417 leader length: 668 |
| 2572 | AGI number: AT4G00710.1 uORF ′5 STOP: 303 uORF 3′ STOP: 417 leader length: 668 |
| 2573 | AGI number: AT4G00710.1 uORF ′5 STOP: 368 uORF 3′ STOP: 446 leader length: 668 |
| 2574 | AGI number: AT4G00710.1 uORF ′5 STOP: 368 uORF 3′ STOP: 446 leader length: 668 |
| 2575 | AGI number: AT4G00730.1 uORF ′5 STOP: 90 uORF 3′ STOP: 243 leader length: 405 |
| 2576 | AGI number: AT4G00730.1 uORF ′5 STOP: 90 uORF 3′ STOP: 243 leader length: 405 |
| 2577 | AGI number: AT4G00955.1 uORF ′5 STOP: 36 uORF 3′ STOP: 108 leader length: 100 |
| 2578 | AGI number: AT4G00955.1 uORF ′5 STOP: 36 uORF 3′ STOP: 108 leader length: 100 |
| 2579 | AGI number: AT4G01090.1 uORF ′5 STOP: 158 uORF 3′ STOP: 209 leader length: 431 |
| 2580 | AGI number: AT4G01090.1 uORF ′5 STOP: 158 uORF 3′ STOP: 209 leader length: 431 |
| 2581 | AGI number: AT4G01210.1 uORF ′5 STOP: 181 uORF 3′ STOP: 238 leader length: 420 |
| 2582 | AGI number: AT4G01210.1 uORF ′5 STOP: 181 uORF 3′ STOP: 238 leader length: 420 |
| 2583 | AGI number: AT4G01290.1 uORF ′5 STOP: 387 uORF 3′ STOP: 438 leader length: 587 |
| 2584 | AGI number: AT4G01290.1 uORF ′5 STOP: 387 uORF 3′ STOP: 438 leader length: 587 |
| 2585 | AGI number: AT4G01290.2 uORF ′5 STOP: 386 uORF 3′ STOP: 437 leader length: 586 |
| 2586 | AGI number: AT4G01290.2 uORF ′5 STOP: 386 uORF 3′ STOP: 437 leader length: 586 |
| 2587 | AGI number: AT4G02010.1 uORF ′5 STOP: 121 uORF 3′ STOP: 229 leader length: 367 |
| 2588 | AGI number: AT4G02010.1 uORF ′5 STOP: 121 uORF 3′ STOP: 229 leader length: 367 |
| 2589 | AGI number: AT4G02010.1 uORF ′5 STOP: 134 uORF 3′ STOP: 218 leader length: 367 |
| 2590 | AGI number: AT4G02010.1 uORF ′5 STOP: 134 uORF 3′ STOP: 218 leader length: 367 |
| 2591 | AGI number: AT4G02140.1 uORF ′5 STOP: 53 uORF 3′ STOP: 215 leader length: 213 |
| 2592 | AGI number: AT4G02140.1 uORF ′5 STOP: 53 uORF 3′ STOP: 215 leader length: 213 |
| 2593 | AGI number: AT4G02170.1 uORF ′5 STOP: 68 uORF 3′ STOP: 128 leader length: 77 |
| 2594 | AGI number: AT4G02170.1 uORF ′5 STOP: 68 uORF 3′ STOP: 128 leader length: 77 |
| 2595 | AGI number: AT4G02550.2 uORF ′5 STOP: 362 uORF 3′ STOP: 416 leader length: 368 |
| 2596 | AGI number: AT4G02550.2 uORF ′5 STOP: 362 uORF 3′ STOP: 416 leader length: 368 |
| 2597 | AGI number: AT4G02570.1 uORF ′5 STOP: 40 uORF 3′ STOP: 103 leader length: 269 |
| 2598 | AGI number: AT4G02570.1 uORF ′5 STOP: 40 uORF 3′ STOP: 103 leader length: 269 |
| 2599 | AGI number: AT4G02710.1 uORF ′5 STOP: 36 uORF 3′ STOP: 168 leader length: 340 |
| 2600 | AGI number: AT4G02710.1 uORF ′5 STOP: 36 uORF 3′ STOP: 168 leader length: 340 |
| 2601 | AGI number: AT4G02710.1 uORF ′5 STOP: 79 uORF 3′ STOP: 157 leader length: 340 |
| 2602 | AGI number: AT4G02710.1 uORF ′5 STOP: 79 uORF 3′ STOP: 157 leader length: 340 |
| 2603 | AGI number: AT4G02710.1 uORF ′5 STOP: 125 uORF 3′ STOP: 179 leader length: 340 |
| 2604 | AGI number: AT4G02710.1 uORF ′5 STOP: 125 uORF 3′ STOP: 179 leader length: 340 |
| 2605 | AGI number: AT4G02760.1 uORF ′5 STOP: 175 uORF 3′ STOP: 286 leader length: 433 |
| 2606 | AGI number: AT4G02760.1 uORF ′5 STOP: 175 uORF 3′ STOP: 286 leader length: 433 |
| 2607 | AGI number: AT4G02760.3 uORF ′5 STOP: 201 uORF 3′ STOP: 402 leader length: 213 |
| 2608 | AGI number: AT4G02760.3 uORF ′5 STOP: 201 uORF 3′ STOP: 402 leader length: 213 |
| 2609 | AGI number: AT4G03000.2 uORF ′5 STOP: 65 uORF 3′ STOP: 194 leader length: 466 |
| 2610 | AGI number: AT4G03000.2 uORF ′5 STOP: 65 uORF 3′ STOP: 194 leader length: 466 |
| 2611 | AGI number: AT4G03090.1 uORF ′5 STOP: 140 uORF 3′ STOP: 200 leader length: 278 |
| 2612 | AGI number: AT4G03090.1 uORF ′5 STOP: 140 uORF 3′ STOP: 200 leader length: 278 |
| 2613 | AGI number: AT4G03200.2 uORF ′5 STOP: 385 uORF 3′ STOP: 436 leader length: 710 |
| 2614 | AGI number: AT4G03200.2 uORF ′5 STOP: 385 uORF 3′ STOP: 436 leader length: 710 |
| 2615 | AGI number: AT4G03205.2 uORF ′5 STOP: 25 uORF 3′ STOP: 145 leader length: 29 |
| 2616 | AGI number: AT4G03205.2 uORF ′5 STOP: 25 uORF 3′ STOP: 145 leader length: 29 |
| 2617 | AGI number: AT4G03260.1 uORF ′5 STOP: 168 uORF 3′ STOP: 387 leader length: 577 |
| 2618 | AGI number: AT4G03260.1 uORF ′5 STOP: 168 uORF 3′ STOP: 387 leader length: 577 |
| 2619 | AGI number: AT4G03260.1 uORF ′5 STOP: 325 uORF 3′ STOP: 418 leader length: 577 |
| 2620 | AGI number: AT4G03260.1 uORF ′5 STOP: 325 uORF 3′ STOP: 418 leader length: 577 |
| 2621 | AGI number: AT4G03260.2 uORF ′5 STOP: 10 uORF 3′ STOP: 229 leader length: 324 |
| 2622 | AGI number: AT4G03260.2 uORF ′5 STOP: 10 uORF 3′ STOP: 229 leader length: 324 |
| 2623 | AGI number: AT4G03280.2 uORF ′5 STOP: 99 uORF 3′ STOP: 183 leader length: 285 |
| 2624 | AGI number: AT4G03280.2 uORF ′5 STOP: 99 uORF 3′ STOP: 183 leader length: 285 |
| 2625 | AGI number: AT4G03410.1 uORF ′5 STOP: 403 uORF 3′ STOP: 556 leader length: 739 |
| 2626 | AGI number: AT4G03410.1 uORF ′5 STOP: 403 uORF 3′ STOP: 556 leader length: 739 |
| 2627 | AGI number: AT4G03410.1 uORF ′5 STOP: 203 uORF 3′ STOP: 308 leader length: 739 |
| 2628 | AGI number: AT4G03410.1 uORF ′5 STOP: 203 uORF 3′ STOP: 308 leader length: 739 |
| 2629 | AGI number: AT4G03410.1 uORF ′5 STOP: 423 uORF 3′ STOP: 477 leader length: 739 |
| 2630 | AGI number: AT4G03410.1 uORF ′5 STOP: 423 uORF 3′ STOP: 477 leader length: 739 |
| 2631 | AGI number: AT4G03410.2 uORF ′5 STOP: 403 uORF 3′ STOP: 556 leader length: 739 |
| 2632 | AGI number: AT4G03410.2 uORF ′5 STOP: 403 uORF 3′ STOP: 556 leader length: 739 |
| 2633 | AGI number: AT4G03410.2 uORF ′5 STOP: 423 uORF 3′ STOP: 477 leader length: 739 |
| 2634 | AGI number: AT4G03410.2 uORF ′5 STOP: 423 uORF 3′ STOP: 477 leader length: 739 |
| 2635 | AGI number: AT4G03500.1 uORF ′5 STOP: 168 uORF 3′ STOP: 363 leader length: 361 |
| 2636 | AGI number: AT4G03500.1 uORF ′5 STOP: 168 uORF 3′ STOP: 363 leader length: 361 |
| 2637 | AGI number: AT4G03510.2 uORF ′5 STOP: 150 uORF 3′ STOP: 204 leader length: 722 |
| 2638 | AGI number: AT4G03510.2 uORF ′5 STOP: 150 uORF 3′ STOP: 204 leader length: 722 |
| 2639 | AGI number: AT4G04340.3 uORF ′5 STOP: 43 uORF 3′ STOP: 208 leader length: 547 |
| 2640 | AGI number: AT4G04340.3 uORF ′5 STOP: 43 uORF 3′ STOP: 208 leader length: 547 |
| 2641 | AGI number: AT4G04340.3 uORF ′5 STOP: 182 uORF 3′ STOP: 248 leader length: 547 |
| 2642 | AGI number: AT4G04340.3 uORF ′5 STOP: 182 uORF 3′ STOP: 248 leader length: 547 |
| 2643 | AGI number: AT4G04340.3 uORF ′5 STOP: 338 uORF 3′ STOP: 443 leader length: 547 |
| 2644 | AGI number: AT4G04340.3 uORF ′5 STOP: 338 uORF 3′ STOP: 443 leader length: 547 |
| 2645 | AGI number: AT4G04740.1 uORF ′5 STOP: 243 uORF 3′ STOP: 315 leader length: 244 |
| 2646 | AGI number: AT4G04740.1 uORF ′5 STOP: 243 uORF 3′ STOP: 315 leader length: 244 |
| 2647 | AGI number: AT4G04890.1 uORF ′5 STOP: 263 uORF 3′ STOP: 356 leader length: 448 |
| 2648 | AGI number: AT4G04890.1 uORF ′5 STOP: 263 uORF 3′ STOP: 356 leader length: 448 |
| 2649 | AGI number: AT4G06634.2 uORF ′5 STOP: 70 uORF 3′ STOP: 295 leader length: 314 |
| 2650 | AGI number: AT4G06634.2 uORF ′5 STOP: 70 uORF 3′ STOP: 295 leader length: 314 |
| 2651 | AGI number: AT4G07990.1 uORF ′5 STOP: 171 uORF 3′ STOP: 297 leader length: 199 |
| 2652 | AGI number: AT4G07990.1 uORF ′5 STOP: 171 uORF 3′ STOP: 297 leader length: 199 |
| 2653 | AGI number: AT4G08700.1 uORF ′5 STOP: 5 uORF 3′ STOP: 80 leader length: 172 |
| 2654 | AGI number: AT4G08700.1 uORF ′5 STOP: 5 uORF 3′ STOP: 80 leader length: 172 |
| 2655 | AGI number: AT4G08980.2 uORF ′5 STOP: 338 uORF 3′ STOP: 470 leader length: 589 |
| 2656 | AGI number: AT4G08980.2 uORF ′5 STOP: 338 uORF 3′ STOP: 470 leader length: 589 |
| 2657 | AGI number: AT4G08980.2 uORF ′5 STOP: 429 uORF 3′ STOP: 483 leader length: 589 |
| 2658 | AGI number: AT4G08980.2 uORF ′5 STOP: 429 uORF 3′ STOP: 483 leader length: 589 |
| 2659 | AGI number: AT4G09640.1 uORF ′5 STOP: 88 uORF 3′ STOP: 163 leader length: 284 |
| 2660 | AGI number: AT4G09640.1 uORF ′5 STOP: 88 uORF 3′ STOP: 163 leader length: 284 |
| 2661 | AGI number: AT4G10390.1 uORF ′5 STOP: 15 uORF 3′ STOP: 114 leader length: 274 |
| 2662 | AGI number: AT4G10390.1 uORF ′5 STOP: 15 uORF 3′ STOP: 114 leader length: 274 |
| 2663 | AGI number: AT4G10955.1 uORF ′5 STOP: 847 uORF 3′ STOP: 1057 leader length: 1475 |
| 2664 | AGI number: AT4G10955.1 uORF ′5 STOP: 847 uORF 3′ STOP: 1057 leader length: 1475 |
| 2665 | AGI number: AT4G10955.1 uORF ′5 STOP: 947 uORF 3′ STOP: 1067 leader length: 1475 |
| 2666 | AGI number: AT4G10955.1 uORF ′5 STOP: 947 uORF 3′ STOP: 1067 leader length: 1475 |
| 2667 | AGI number: AT4G11440.1 uORF ′5 STOP: 16 uORF 3′ STOP: 82 leader length: 151 |
| 2668 | AGI number: AT4G11440.1 uORF ′5 STOP: 16 uORF 3′ STOP: 82 leader length: 151 |
| 2669 | AGI number: AT4G11450.1 uORF ′5 STOP: 56 uORF 3′ STOP: 125 leader length: 317 |
| 2670 | AGI number: AT4G11450.1 uORF ′5 STOP: 56 uORF 3′ STOP: 125 leader length: 317 |
| 2671 | AGI number: AT4G11570.2 uORF ′5 STOP: 179 uORF 3′ STOP: 245 leader length: 408 |
| 2672 | AGI number: AT4G11570.2 uORF ′5 STOP: 179 uORF 3′ STOP: 245 leader length: 408 |
| 2673 | AGI number: AT4G11570.2 uORF ′5 STOP: 187 uORF 3′ STOP: 241 leader length: 408 |
| 2674 | AGI number: AT4G11570.2 uORF ′5 STOP: 187 uORF 3′ STOP: 241 leader length: 408 |
| 2675 | AGI number: AT4G11800.1 uORF ′5 STOP: 155 uORF 3′ STOP: 221 leader length: 374 |
| 2676 | AGI number: AT4G11800.1 uORF ′5 STOP: 155 uORF 3′ STOP: 221 leader length: 374 |
| 2677 | AGI number: AT4G11830.1 uORF ′5 STOP: 134 uORF 3′ STOP: 404 leader length: 1096 |
| 2678 | AGI number: AT4G11830.1 uORF ′5 STOP: 134 uORF 3′ STOP: 404 leader length: 1096 |
| 2679 | AGI number: AT4G11830.1 uORF ′5 STOP: 348 uORF 3′ STOP: 411 leader length: 1096 |
| 2680 | AGI number: AT4G11830.1 uORF ′5 STOP: 348 uORF 3′ STOP: 411 leader length: 1096 |
| 2681 | AGI number: AT4G11830.1 uORF ′5 STOP: 944 uORF 3′ STOP: 1007 leader length: 1096 |
| 2682 | AGI number: AT4G11830.1 uORF ′5 STOP: 944 uORF 3′ STOP: 1007 leader length: 1096 |
| 2683 | AGI number: AT4G11830.2 uORF ′5 STOP: 134 uORF 3′ STOP: 404 leader length: 1096 |
| 2684 | AGI number: AT4G11830.2 uORF ′5 STOP: 134 uORF 3′ STOP: 404 leader length: 1096 |
| 2685 | AGI number: AT4G11830.2 uORF ′5 STOP: 348 uORF 3′ STOP: 411 leader length: 1096 |
| 2686 | AGI number: AT4G11830.2 uORF ′5 STOP: 348 uORF 3′ STOP: 411 leader length: 1096 |
| 2687 | AGI number: AT4G11960.2 uORF ′5 STOP: 120 uORF 3′ STOP: 243 leader length: 193 |
| 2688 | AGI number: AT4G11960.2 uORF ′5 STOP: 120 uORF 3′ STOP: 243 leader length: 193 |
| 2689 | AGI number: AT4G12040.2 uORF ′5 STOP: 149 uORF 3′ STOP: 200 leader length: 631 |
| 2690 | AGI number: AT4G12040.2 uORF ′5 STOP: 149 uORF 3′ STOP: 200 leader length: 631 |
| 2691 | AGI number: AT4G12040.2 uORF ′5 STOP: 106 uORF 3′ STOP: 175 leader length: 631 |
| 2692 | AGI number: AT4G12040.2 uORF ′5 STOP: 106 uORF 3′ STOP: 175 leader length: 631 |
| 2693 | AGI number: AT4G12120.1 uORF ′5 STOP: 136 uORF 3′ STOP: 211 leader length: 266 |
| 2694 | AGI number: AT4G12120.1 uORF ′5 STOP: 136 uORF 3′ STOP: 211 leader length: 266 |
| 2695 | AGI number: AT4G12420.1 uORF ′5 STOP: 1 uORF 3′ STOP: 109 leader length: 206 |
| 2696 | AGI number: AT4G12420.1 uORF ′5 STOP: 1 uORF 3′ STOP: 109 leader length: 206 |
| 2697 | AGI number: AT4G12420.2 uORF ′5 STOP: 62 uORF 3′ STOP: 170 leader length: 267 |
| 2698 | AGI number: AT4G12420.2 uORF ′5 STOP: 62 uORF 3′ STOP: 170 leader length: 267 |
| 2699 | AGI number: AT4G12750.1 uORF ′5 STOP: 151 uORF 3′ STOP: 244 leader length: 311 |
| 2700 | AGI number: AT4G12750.1 uORF ′5 STOP: 151 uORF 3′ STOP: 244 leader length: 311 |
| 2701 | AGI number: AT4G12990.1 uORF ′5 STOP: 6 uORF 3′ STOP: 123 leader length: 129 |
| 2702 | AGI number: AT4G12990.1 uORF ′5 STOP: 6 uORF 3′ STOP: 123 leader length: 129 |
| 2703 | AGI number: AT4G13020.5 uORF ′5 STOP: 319 uORF 3′ STOP: 424 leader length: 507 |
| 2704 | AGI number: AT4G13020.5 uORF ′5 STOP: 319 uORF 3′ STOP: 424 leader length: 507 |
| 2705 | AGI number: AT4G13100.1 uORF ′5 STOP: 109 uORF 3′ STOP: 181 leader length: 329 |
| 2706 | AGI number: AT4G13100.1 uORF ′5 STOP: 109 uORF 3′ STOP: 181 leader length: 329 |
| 2707 | AGI number: AT4G13100.3 uORF ′5 STOP: 109 uORF 3′ STOP: 181 leader length: 329 |
| 2708 | AGI number: AT4G13100.3 uORF ′5 STOP: 109 uORF 3′ STOP: 181 leader length: 329 |
| 2709 | AGI number: AT4G13100.5 uORF ′5 STOP: 105 uORF 3′ STOP: 177 leader length: 330 |
| 2710 | AGI number: AT4G13100.5 uORF ′5 STOP: 105 uORF 3′ STOP: 177 leader length: 330 |
| 2711 | AGI number: AT4G13100.5 uORF ′5 STOP: 137 uORF 3′ STOP: 200 leader length: 330 |
| 2712 | AGI number: AT4G13100.5 uORF ′5 STOP: 137 uORF 3′ STOP: 200 leader length: 330 |
| 2713 | AGI number: AT4G13100.5 uORF ′5 STOP: 154 uORF 3′ STOP: 217 leader length: 330 |
| 2714 | AGI number: AT4G13100.5 uORF ′5 STOP: 154 uORF 3′ STOP: 217 leader length: 330 |
| 2715 | AGI number: AT4G13260.1 uORF ′5 STOP: 51 uORF 3′ STOP: 105 leader length: 373 |
| 2716 | AGI number: AT4G13260.1 uORF ′5 STOP: 51 uORF 3′ STOP: 105 leader length: 373 |
| 2717 | AGI number: AT4G13260.1 uORF ′5 STOP: 80 uORF 3′ STOP: 296 leader length: 373 |
| 2718 | AGI number: AT4G13260.1 uORF ′5 STOP: 80 uORF 3′ STOP: 296 leader length: 373 |
| 2719 | AGI number: AT4G13260.1 uORF ′5 STOP: 232 uORF 3′ STOP: 301 leader length: 373 |
| 2720 | AGI number: AT4G13260.1 uORF ′5 STOP: 232 uORF 3′ STOP: 301 leader length: 373 |
| 2721 | AGI number: AT4G13345.1 uORF ′5 STOP: 499 uORF 3′ STOP: 667 leader length: 548 |
| 2722 | AGI number: AT4G13345.1 uORF ′5 STOP: 499 uORF 3′ STOP: 667 leader length: 548 |
| 2723 | AGI number: AT4G13345.2 uORF ′5 STOP: 451 uORF 3′ STOP: 619 leader length: 500 |
| 2724 | AGI number: AT4G13345.2 uORF ′5 STOP: 451 uORF 3′ STOP: 619 leader length: 500 |
| 2725 | AGI number: AT4G13550.1 uORF ′5 STOP: 259 uORF 3′ STOP: 487 leader length: 629 |
| 2726 | AGI number: AT4G13550.1 uORF ′5 STOP: 259 uORF 3′ STOP: 487 leader length: 629 |
| 2727 | AGI number: AT4G14350.1 uORF ′5 STOP: 133 uORF 3′ STOP: 193 leader length: 308 |
| 2728 | AGI number: AT4G14350.1 uORF ′5 STOP: 133 uORF 3′ STOP: 193 leader length: 308 |
| 2729 | AGI number: AT4G14350.1 uORF ′5 STOP: 162 uORF 3′ STOP: 225 leader length: 308 |
| 2730 | AGI number: AT4G14350.1 uORF ′5 STOP: 162 uORF 3′ STOP: 225 leader length: 308 |
| 2731 | AGI number: AT4G14350.2 uORF ′5 STOP: 258 uORF 3′ STOP: 321 leader length: 404 |
| 2732 | AGI number: AT4G14350.2 uORF ′5 STOP: 258 uORF 3′ STOP: 321 leader length: 404 |
| 2733 | AGI number: AT4G14350.3 uORF ′5 STOP: 258 uORF 3′ STOP: 321 leader length: 404 |
| 2734 | AGI number: AT4G14350.3 uORF ′5 STOP: 258 uORF 3′ STOP: 321 leader length: 404 |
| 2735 | AGI number: AT4G14520.3 uORF ′5 STOP: 120 uORF 3′ STOP: 195 leader length: 312 |
| 2736 | AGI number: AT4G14520.3 uORF ′5 STOP: 120 uORF 3′ STOP: 195 leader length: 312 |
| 2737 | AGI number: AT4G14620.1 uORF ′5 STOP: 146 uORF 3′ STOP: 299 leader length: 385 |
| 2738 | AGI number: AT4G14620.1 uORF ′5 STOP: 146 uORF 3′ STOP: 299 leader length: 385 |
| 2739 | AGI number: AT4G14620.1 uORF ′5 STOP: 210 uORF 3′ STOP: 294 leader length: 385 |
| 2740 | AGI number: AT4G14620.1 uORF ′5 STOP: 210 uORF 3′ STOP: 294 leader length: 385 |
| 2741 | AGI number: AT4G14710.5 uORF ′5 STOP: 4 uORF 3′ STOP: 136 leader length: 230 |
| 2742 | AGI number: AT4G14710.5 uORF ′5 STOP: 4 uORF 3′ STOP: 136 leader length: 230 |
| 2743 | AGI number: AT4G14850.1 uORF ′5 STOP: 10 uORF 3′ STOP: 373 leader length: 88 |
| 2744 | AGI number: AT4G14850.1 uORF ′5 STOP: 10 uORF 3′ STOP: 373 leader length: 88 |
| 2745 | AGI number: AT4G14880.3 uORF ′5 STOP: 79 uORF 3′ STOP: 178 leader length: 291 |
| 2746 | AGI number: AT4G14880.3 uORF ′5 STOP: 79 uORF 3′ STOP: 178 leader length: 291 |
| 2747 | AGI number: AT4G14880.4 uORF ′5 STOP: 79 uORF 3′ STOP: 178 leader length: 294 |
| 2748 | AGI number: AT4G14880.4 uORF ′5 STOP: 79 uORF 3′ STOP: 178 leader length: 294 |
| 2749 | AGI number: AT4G15010.2 uORF ′5 STOP: 83 uORF 3′ STOP: 158 leader length: 362 |
| 2750 | AGI number: AT4G15010.2 uORF ′5 STOP: 83 uORF 3′ STOP: 158 leader length: 362 |
| 2751 | AGI number: AT4G15080.1 uORF ′5 STOP: 35 uORF 3′ STOP: 158 leader length: 351 |
| 2752 | AGI number: AT4G15080.1 uORF ′5 STOP: 35 uORF 3′ STOP: 158 leader length: 351 |
| 2753 | AGI number: AT4G15530.3 uORF ′5 STOP: 166 uORF 3′ STOP: 223 leader length: 452 |
| 2754 | AGI number: AT4G15530.3 uORF ′5 STOP: 166 uORF 3′ STOP: 223 leader length: 452 |
| 2755 | AGI number: AT4G16070.2 uORF ′5 STOP: 134 uORF 3′ STOP: 257 leader length: 387 |
| 2756 | AGI number: AT4G16070.2 uORF ′5 STOP: 134 uORF 3′ STOP: 257 leader length: 387 |
| 2757 | AGI number: AT4G16070.2 uORF ′5 STOP: 196 uORF 3′ STOP: 250 leader length: 387 |
| 2758 | AGI number: AT4G16070.2 uORF ′5 STOP: 196 uORF 3′ STOP: 250 leader length: 387 |
| 2759 | AGI number: AT4G16070.2 uORF ′5 STOP: 269 uORF 3′ STOP: 323 leader length: 387 |
| 2760 | AGI number: AT4G16070.2 uORF ′5 STOP: 269 uORF 3′ STOP: 323 leader length: 387 |
| 2761 | AGI number: AT4G16280.2 uORF ′5 STOP: 92 uORF 3′ STOP: 170 leader length: 413 |
| 2762 | AGI number: AT4G16280.2 uORF ′5 STOP: 92 uORF 3′ STOP: 170 leader length: 413 |
| 2763 | AGI number: AT4G16360.1 uORF ′5 STOP: 115 uORF 3′ STOP: 250 leader length: 463 |
| 2764 | AGI number: AT4G16360.1 uORF ′5 STOP: 115 uORF 3′ STOP: 250 leader length: 463 |
| 2765 | AGI number: AT4G16360.2 uORF ′5 STOP: 5 uORF 3′ STOP: 107 leader length: 540 |
| 2766 | AGI number: AT4G16360.2 uORF ′5 STOP: 5 uORF 3′ STOP: 107 leader length: 540 |
| 2767 | AGI number: AT4G16360.2 uORF ′5 STOP: 75 uORF 3′ STOP: 132 leader length: 540 |
| 2768 | AGI number: AT4G16360.2 uORF ′5 STOP: 75 uORF 3′ STOP: 132 leader length: 540 |
| 2769 | AGI number: AT4G16360.2 uORF ′5 STOP: 192 uORF 3′ STOP: 327 leader length: 540 |
| 2770 | AGI number: AT4G16360.2 uORF ′5 STOP: 192 uORF 3′ STOP: 327 leader length: 540 |
| 2771 | AGI number: AT4G16360.3 uORF ′5 STOP: 49 uORF 3′ STOP: 151 leader length: 493 |
| 2772 | AGI number: AT4G16360.3 uORF ′5 STOP: 49 uORF 3′ STOP: 151 leader length: 493 |
| 2773 | AGI number: AT4G16360.3 uORF ′5 STOP: 236 uORF 3′ STOP: 371 leader length: 493 |
| 2774 | AGI number: AT4G16360.3 uORF ′5 STOP: 236 uORF 3′ STOP: 371 leader length: 493 |
| 2775 | AGI number: AT4G16520.2 uORF ′5 STOP: 37 uORF 3′ STOP: 91 leader length: 329 |
| 2776 | AGI number: AT4G16520.2 uORF ′5 STOP: 37 uORF 3′ STOP: 91 leader length: 329 |
| 2777 | AGI number: AT4G16520.2 uORF ′5 STOP: 12 uORF 3′ STOP: 111 leader length: 329 |
| 2778 | AGI number: AT4G16520.2 uORF ′5 STOP: 12 uORF 3′ STOP: 111 leader length: 329 |
| 2779 | AGI number: AT4G16765.2 uORF ′5 STOP: 28 uORF 3′ STOP: 211 leader length: 310 |
| 2780 | AGI number: AT4G16765.2 uORF ′5 STOP: 28 uORF 3′ STOP: 211 leader length: 310 |
| 2781 | AGI number: AT4G16765.2 uORF ′5 STOP: 102 uORF 3′ STOP: 192 leader length: 310 |
| 2782 | AGI number: AT4G16765.2 uORF ′5 STOP: 102 uORF 3′ STOP: 192 leader length: 310 |
| 2783 | AGI number: AT4G16845.1 uORF ′5 STOP: 89 uORF 3′ STOP: 149 leader length: 232 |
| 2784 | AGI number: AT4G16845.1 uORF ′5 STOP: 89 uORF 3′ STOP: 149 leader length: 232 |
| 2785 | AGI number: AT4G16845.2 uORF ′5 STOP: 288 uORF 3′ STOP: 342 leader length: 588 |
| 2786 | AGI number: AT4G16845.2 uORF ′5 STOP: 288 uORF 3′ STOP: 342 leader length: 588 |
| 2787 | AGI number: AT4G16845.2 uORF ′5 STOP: 212 uORF 3′ STOP: 353 leader length: 588 |
| 2788 | AGI number: AT4G16845.2 uORF ′5 STOP: 212 uORF 3′ STOP: 353 leader length: 588 |
| 2789 | AGI number: AT4G16845.2 uORF ′5 STOP: 77 uORF 3′ STOP: 137 leader length: 588 |
| 2790 | AGI number: AT4G16845.2 uORF ′5 STOP: 77 uORF 3′ STOP: 137 leader length: 588 |
| 2791 | AGI number: AT4G16845.2 uORF ′5 STOP: 483 uORF 3′ STOP: 609 leader length: 588 |
| 2792 | AGI number: AT4G16845.2 uORF ′5 STOP: 483 uORF 3′ STOP: 609 leader length: 588 |
| 2793 | AGI number: AT4G16940.1 uORF ′5 STOP: 57 uORF 3′ STOP: 114 leader length: 94 |
| 2794 | AGI number: AT4G16940.1 uORF ′5 STOP: 57 uORF 3′ STOP: 114 leader length: 94 |
| 2795 | AGI number: AT4G16990.4 uORF ′5 STOP: 290 uORF 3′ STOP: 350 leader length: 671 |
| 2796 | AGI number: AT4G16990.4 uORF ′5 STOP: 290 uORF 3′ STOP: 350 leader length: 671 |
| 2797 | AGI number: AT4G16990.5 uORF ′5 STOP: 331 uORF 3′ STOP: 439 leader length: 671 |
| 2798 | AGI number: AT4G16990.5 uORF ′5 STOP: 331 uORF 3′ STOP: 439 leader length: 671 |
| 2799 | AGI number: AT4G17020.1 uORF ′5 STOP: 74 uORF 3′ STOP: 206 leader length: 310 |
| 2800 | AGI number: AT4G17020.1 uORF ′5 STOP: 74 uORF 3′ STOP: 206 leader length: 310 |
| 2801 | AGI number: AT4G17020.2 uORF ′5 STOP: 74 uORF 3′ STOP: 206 leader length: 310 |
| 2802 | AGI number: AT4G17020.2 uORF ′5 STOP: 74 uORF 3′ STOP: 206 leader length: 310 |
| 2803 | AGI number: AT4G17020.2 uORF ′5 STOP: 81 uORF 3′ STOP: 189 leader length: 310 |
| 2804 | AGI number: AT4G17020.2 uORF ′5 STOP: 81 uORF 3′ STOP: 189 leader length: 310 |
| 2805 | AGI number: AT4G17140.1 uORF ′5 STOP: 66 uORF 3′ STOP: 147 leader length: 255 |
| 2806 | AGI number: AT4G17140.1 uORF ′5 STOP: 66 uORF 3′ STOP: 147 leader length: 255 |
| 2807 | AGI number: AT4G17140.2 uORF ′5 STOP: 66 uORF 3′ STOP: 147 leader length: 255 |
| 2808 | AGI number: AT4G17140.2 uORF ′5 STOP: 66 uORF 3′ STOP: 147 leader length: 255 |
| 2809 | AGI number: AT4G17140.3 uORF ′5 STOP: 66 uORF 3′ STOP: 147 leader length: 255 |
| 2810 | AGI number: AT4G17140.3 uORF ′5 STOP: 66 uORF 3′ STOP: 147 leader length: 255 |
| 2811 | AGI number: AT4G17410.1 uORF ′5 STOP: 225 uORF 3′ STOP: 348 leader length: 586 |
| 2812 | AGI number: AT4G17410.1 uORF ′5 STOP: 225 uORF 3′ STOP: 348 leader length: 586 |
| 2813 | AGI number: AT4G17410.1 uORF ′5 STOP: 239 uORF 3′ STOP: 353 leader length: 586 |
| 2814 | AGI number: AT4G17410.1 uORF ′5 STOP: 239 uORF 3′ STOP: 353 leader length: 586 |
| 2815 | AGI number: AT4G17410.2 uORF ′5 STOP: 238 uORF 3′ STOP: 361 leader length: 439 |
| 2816 | AGI number: AT4G17410.2 uORF ′5 STOP: 238 uORF 3′ STOP: 361 leader length: 439 |
| 2817 | AGI number: AT4G17410.3 uORF ′5 STOP: 238 uORF 3′ STOP: 361 leader length: 599 |
| 2818 | AGI number: AT4G17410.3 uORF ′5 STOP: 238 uORF 3′ STOP: 361 leader length: 599 |
| 2819 | AGI number: AT4G17410.3 uORF ′5 STOP: 252 uORF 3′ STOP: 366 leader length: 599 |
| 2820 | AGI number: AT4G17410.3 uORF ′5 STOP: 252 uORF 3′ STOP: 366 leader length: 599 |
| 2821 | AGI number: AT4G18020.1 uORF ′5 STOP: 92 uORF 3′ STOP: 377 leader length: 144 |
| 2822 | AGI number: AT4G18020.1 uORF ′5 STOP: 92 uORF 3′ STOP: 377 leader length: 144 |
| 2823 | AGI number: AT4G18020.6 uORF ′5 STOP: 34 uORF 3′ STOP: 160 leader length: 307 |
| 2824 | AGI number: AT4G18020.6 uORF ′5 STOP: 34 uORF 3′ STOP: 160 leader length: 307 |
| 2825 | AGI number: AT4G18020.6 uORF ′5 STOP: 74 uORF 3′ STOP: 191 leader length: 307 |
| 2826 | AGI number: AT4G18020.6 uORF ′5 STOP: 74 uORF 3′ STOP: 191 leader length: 307 |
| 2827 | AGI number: AT4G18880.1 uORF ′5 STOP: 211 uORF 3′ STOP: 277 leader length: 511 |
| 2828 | AGI number: AT4G18880.1 uORF ′5 STOP: 211 uORF 3′ STOP: 277 leader length: 511 |
| 2829 | AGI number: AT4G19110.1 uORF ′5 STOP: 176 uORF 3′ STOP: 440 leader length: 938 |
| 2830 | AGI number: AT4G19110.1 uORF ′5 STOP: 176 uORF 3′ STOP: 440 leader length: 938 |
| 2831 | AGI number: AT4G19110.1 uORF ′5 STOP: 280 uORF 3′ STOP: 412 leader length: 938 |
| 2832 | AGI number: AT4G19110.1 uORF ′5 STOP: 280 uORF 3′ STOP: 412 leader length: 938 |
| 2833 | AGI number: AT4G19110.1 uORF ′5 STOP: 558 uORF 3′ STOP: 615 leader length: 938 |
| 2834 | AGI number: AT4G19110.1 uORF ′5 STOP: 558 uORF 3′ STOP: 615 leader length: 938 |
| 2835 | AGI number: AT4G19110.2 uORF ′5 STOP: 146 uORF 3′ STOP: 410 leader length: 908 |
| 2836 | AGI number: AT4G19110.2 uORF ′5 STOP: 146 uORF 3′ STOP: 410 leader length: 908 |
| 2837 | AGI number: AT4G19110.2 uORF ′5 STOP: 250 uORF 3′ STOP: 382 leader length: 908 |
| 2838 | AGI number: AT4G19110.2 uORF ′5 STOP: 250 uORF 3′ STOP: 382 leader length: 908 |
| 2839 | AGI number: AT4G19112.1 uORF ′5 STOP: 176 uORF 3′ STOP: 440 leader length: 285 |
| 2840 | AGI number: AT4G19112.1 uORF ′5 STOP: 176 uORF 3′ STOP: 440 leader length: 285 |
| 2841 | AGI number: AT4G19160.1 uORF ′5 STOP: 150 uORF 3′ STOP: 390 leader length: 915 |
| 2842 | AGI number: AT4G19160.1 uORF ′5 STOP: 150 uORF 3′ STOP: 390 leader length: 915 |
| 2843 | AGI number: AT4G19160.1 uORF ′5 STOP: 299 uORF 3′ STOP: 356 leader length: 915 |
| 2844 | AGI number: AT4G19160.1 uORF ′5 STOP: 299 uORF 3′ STOP: 356 leader length: 915 |
| 2845 | AGI number: AT4G19160.2 uORF ′5 STOP: 150 uORF 3′ STOP: 390 leader length: 466 |
| 2846 | AGI number: AT4G19160.2 uORF ′5 STOP: 150 uORF 3′ STOP: 390 leader length: 466 |
| 2847 | AGI number: AT4G19160.2 uORF ′5 STOP: 299 uORF 3′ STOP: 356 leader length: 466 |
| 2848 | AGI number: AT4G19160.2 uORF ′5 STOP: 299 uORF 3′ STOP: 356 leader length: 466 |
| 2849 | AGI number: AT4G19550.2 uORF ′5 STOP: 136 uORF 3′ STOP: 277 leader length: 187 |
| 2850 | AGI number: AT4G19550.2 uORF ′5 STOP: 136 uORF 3′ STOP: 277 leader length: 187 |
| 2851 | AGI number: AT4G19645.1 uORF ′5 STOP: 36 uORF 3′ STOP: 87 leader length: 161 |
| 2852 | AGI number: AT4G19645.1 uORF ′5 STOP: 36 uORF 3′ STOP: 87 leader length: 161 |
| 2853 | AGI number: AT4G20325.1 uORF ′5 STOP: 53 uORF 3′ STOP: 107 leader length: 184 |
| 2854 | AGI number: AT4G20325.1 uORF ′5 STOP: 53 uORF 3′ STOP: 107 leader length: 184 |
| 2855 | AGI number: AT4G20325.2 uORF ′5 STOP: 53 uORF 3′ STOP: 107 leader length: 184 |
| 2856 | AGI number: AT4G20325.2 uORF ′5 STOP: 53 uORF 3′ STOP: 107 leader length: 184 |
| 2857 | AGI number: AT4G21060.2 uORF ′5 STOP: 7 uORF 3′ STOP: 127 leader length: 477 |
| 2858 | AGI number: AT4G21060.2 uORF ′5 STOP: 7 uORF 3′ STOP: 127 leader length: 477 |
| 2859 | AGI number: AT4G21060.2 uORF ′5 STOP: 62 uORF 3′ STOP: 122 leader length: 477 |
| 2860 | AGI number: AT4G21060.2 uORF ′5 STOP: 62 uORF 3′ STOP: 122 leader length: 477 |
| 2861 | AGI number: AT4G21060.2 uORF ′5 STOP: 238 uORF 3′ STOP: 379 leader length: 477 |
| 2862 | AGI number: AT4G21060.2 uORF ′5 STOP: 238 uORF 3′ STOP: 379 leader length: 477 |
| 2863 | AGI number: AT4G21270.1 uORF ′5 STOP: 58 uORF 3′ STOP: 115 leader length: 251 |
| 2864 | AGI number: AT4G21270.1 uORF ′5 STOP: 58 uORF 3′ STOP: 115 leader length: 251 |
| 2865 | AGI number: AT4G21720.2 uORF ′5 STOP: 73 uORF 3′ STOP: 208 leader length: 219 |
| 2866 | AGI number: AT4G21720.2 uORF ′5 STOP: 73 uORF 3′ STOP: 208 leader length: 219 |
| 2867 | AGI number: AT4G21750.1 uORF ′5 STOP: 234 uORF 3′ STOP: 285 leader length: 365 |
| 2868 | AGI number: AT4G21750.1 uORF ′5 STOP: 234 uORF 3′ STOP: 285 leader length: 365 |
| 2869 | AGI number: AT4G21750.2 uORF ′5 STOP: 313 uORF 3′ STOP: 373 leader length: 466 |
| 2870 | AGI number: AT4G21750.2 uORF ′5 STOP: 313 uORF 3′ STOP: 373 leader length: 466 |
| 2871 | AGI number: AT4G21750.2 uORF ′5 STOP: 317 uORF 3′ STOP: 386 leader length: 466 |
| 2872 | AGI number: AT4G21750.2 uORF ′5 STOP: 317 uORF 3′ STOP: 386 leader length: 466 |
| 2873 | AGI number: AT4G21850.2 uORF ′5 STOP: 96 uORF 3′ STOP: 381 leader length: 100 |
| 2874 | AGI number: AT4G21850.2 uORF ′5 STOP: 96 uORF 3′ STOP: 381 leader length: 100 |
| 2875 | AGI number: AT4G22140.1 uORF ′5 STOP: 22 uORF 3′ STOP: 82 leader length: 279 |
| 2876 | AGI number: AT4G22140.1 uORF ′5 STOP: 22 uORF 3′ STOP: 82 leader length: 279 |
| 2877 | AGI number: AT4G22140.2 uORF ′5 STOP: 22 uORF 3′ STOP: 82 leader length: 279 |
| 2878 | AGI number: AT4G22140.2 uORF ′5 STOP: 22 uORF 3′ STOP: 82 leader length: 279 |
| 2879 | AGI number: AT4G22150.1 uORF ′5 STOP: 50 uORF 3′ STOP: 125 leader length: 101 |
| 2880 | AGI number: AT4G22150.1 uORF ′5 STOP: 50 uORF 3′ STOP: 125 leader length: 101 |
| 2881 | AGI number: AT4G22285.1 uORF ′5 STOP: 156 uORF 3′ STOP: 231 leader length: 362 |
| 2882 | AGI number: AT4G22285.1 uORF ′5 STOP: 156 uORF 3′ STOP: 231 leader length: 362 |
| 2883 | AGI number: AT4G22305.1 uORF ′5 STOP: 15 uORF 3′ STOP: 231 leader length: 136 |
| 2884 | AGI number: AT4G22305.1 uORF ′5 STOP: 15 uORF 3′ STOP: 231 leader length: 136 |
| 2885 | AGI number: AT4G22810.1 uORF ′5 STOP: 50 uORF 3′ STOP: 185 leader length: 292 |
| 2886 | AGI number: AT4G22810.1 uORF ′5 STOP: 50 uORF 3′ STOP: 185 leader length: 292 |
| 2887 | AGI number: AT4G22810.1 uORF ′5 STOP: 118 uORF 3′ STOP: 181 leader length: 292 |
| 2888 | AGI number: AT4G22810.1 uORF ′5 STOP: 118 uORF 3′ STOP: 181 leader length: 292 |
| 2889 | AGI number: AT4G22860.2 uORF ′5 STOP: 44 uORF 3′ STOP: 233 leader length: 352 |
| 2890 | AGI number: AT4G22860.2 uORF ′5 STOP: 44 uORF 3′ STOP: 233 leader length: 352 |
| 2891 | AGI number: AT4G22970.2 uORF ′5 STOP: 128 uORF 3′ STOP: 308 leader length: 156 |
| 2892 | AGI number: AT4G22970.2 uORF ′5 STOP: 128 uORF 3′ STOP: 308 leader length: 156 |
| 2893 | AGI number: AT4G22990.1 uORF ′5 STOP: 14 uORF 3′ STOP: 164 leader length: 277 |
| 2894 | AGI number: AT4G22990.1 uORF ′5 STOP: 14 uORF 3′ STOP: 164 leader length: 277 |
| 2895 | AGI number: AT4G22990.2 uORF ′5 STOP: 14 uORF 3′ STOP: 164 leader length: 277 |
| 2896 | AGI number: AT4G22990.2 uORF ′5 STOP: 14 uORF 3′ STOP: 164 leader length: 277 |
| 2897 | AGI number: AT4G22990.2 uORF ′5 STOP: 123 uORF 3′ STOP: 195 leader length: 277 |
| 2898 | AGI number: AT4G22990.2 uORF ′5 STOP: 123 uORF 3′ STOP: 195 leader length: 277 |
| 2899 | AGI number: AT4G23000.1 uORF ′5 STOP: 689 uORF 3′ STOP: 857 leader length: 786 |
| 2900 | AGI number: AT4G23000.1 uORF ′5 STOP: 689 uORF 3′ STOP: 857 leader length: 786 |
| 2901 | AGI number: AT4G23020.2 uORF ′5 STOP: 87 uORF 3′ STOP: 186 leader length: 96 |
| 2902 | AGI number: AT4G23020.2 uORF ′5 STOP: 87 uORF 3′ STOP: 186 leader length: 96 |
| 2903 | AGI number: AT4G23420.1 uORF ′5 STOP: 92 uORF 3′ STOP: 182 leader length: 681 |
| 2904 | AGI number: AT4G23420.1 uORF ′5 STOP: 92 uORF 3′ STOP: 182 leader length: 681 |
| 2905 | AGI number: AT4G23420.1 uORF ′5 STOP: 612 uORF 3′ STOP: 759 leader length: 681 |
| 2906 | AGI number: AT4G23420.1 uORF ′5 STOP: 612 uORF 3′ STOP: 759 leader length: 681 |
| 2907 | AGI number: AT4G23420.2 uORF ′5 STOP: 93 uORF 3′ STOP: 183 leader length: 548 |
| 2908 | AGI number: AT4G23420.2 uORF ′5 STOP: 93 uORF 3′ STOP: 183 leader length: 548 |
| 2909 | AGI number: AT4G23420.3 uORF ′5 STOP: 184 uORF 3′ STOP: 274 leader length: 545 |
| 2910 | AGI number: AT4G23420.3 uORF ′5 STOP: 184 uORF 3′ STOP: 274 leader length: 545 |
| 2911 | AGI number: AT4G23420.3 uORF ′5 STOP: 68 uORF 3′ STOP: 293 leader length: 545 |
| 2912 | AGI number: AT4G23420.3 uORF ′5 STOP: 68 uORF 3′ STOP: 293 leader length: 545 |
| 2913 | AGI number: AT4G23470.2 uORF ′5 STOP: 133 uORF 3′ STOP: 364 leader length: 734 |
| 2914 | AGI number: AT4G23470.2 uORF ′5 STOP: 133 uORF 3′ STOP: 364 leader length: 734 |
| 2915 | AGI number: AT4G23470.2 uORF ′5 STOP: 236 uORF 3′ STOP: 380 leader length: 734 |
| 2916 | AGI number: AT4G23470.2 uORF ′5 STOP: 236 uORF 3′ STOP: 380 leader length: 734 |
| 2917 | AGI number: AT4G23470.2 uORF ′5 STOP: 288 uORF 3′ STOP: 375 leader length: 734 |
| 2918 | AGI number: AT4G23470.2 uORF ′5 STOP: 288 uORF 3′ STOP: 375 leader length: 734 |
| 2919 | AGI number: AT4G23740.1 uORF ′5 STOP: 54 uORF 3′ STOP: 126 leader length: 294 |
| 2920 | AGI number: AT4G23740.1 uORF ′5 STOP: 54 uORF 3′ STOP: 126 leader length: 294 |
| 2921 | AGI number: AT4G23770.1 uORF ′5 STOP: 267 uORF 3′ STOP: 318 leader length: 446 |
| 2922 | AGI number: AT4G23770.1 uORF ′5 STOP: 267 uORF 3′ STOP: 318 leader length: 446 |
| 2923 | AGI number: AT4G23860.2 uORF ′5 STOP: 9 uORF 3′ STOP: 114 leader length: 200 |
| 2924 | AGI number: AT4G23860.2 uORF ′5 STOP: 9 uORF 3′ STOP: 114 leader length: 200 |
| 2925 | AGI number: AT4G23860.2 uORF ′5 STOP: 44 uORF 3′ STOP: 107 leader length: 200 |
| 2926 | AGI number: AT4G23860.2 uORF ′5 STOP: 44 uORF 3′ STOP: 107 leader length: 200 |
| 2927 | AGI number: AT4G24480.1 uORF ′5 STOP: 217 uORF 3′ STOP: 355 leader length: 423 |
| 2928 | AGI number: AT4G24480.1 uORF ′5 STOP: 217 uORF 3′ STOP: 355 leader length: 423 |
| 2929 | AGI number: AT4G24670.2 uORF ′5 STOP: 19 uORF 3′ STOP: 115 leader length: 233 |
| 2930 | AGI number: AT4G24670.2 uORF ′5 STOP: 19 uORF 3′ STOP: 115 leader length: 233 |
| 2931 | AGI number: AT4G24960.2 uORF ′5 STOP: 23 uORF 3′ STOP: 182 leader length: 344 |
| 2932 | AGI number: AT4G24960.2 uORF ′5 STOP: 23 uORF 3′ STOP: 182 leader length: 344 |
| 2933 | AGI number: AT4G25100.1 uORF ′5 STOP: 7 uORF 3′ STOP: 79 leader length: 194 |
| 2934 | AGI number: AT4G25100.1 uORF ′5 STOP: 7 uORF 3′ STOP: 79 leader length: 194 |
| 2935 | AGI number: AT4G25320.1 uORF ′5 STOP: 137 uORF 3′ STOP: 218 leader length: 411 |
| 2936 | AGI number: AT4G25320.1 uORF ′5 STOP: 137 uORF 3′ STOP: 218 leader length: 411 |
| 2937 | AGI number: AT4G25320.1 uORF ′5 STOP: 151 uORF 3′ STOP: 223 leader length: 411 |
| 2938 | AGI number: AT4G25320.1 uORF ′5 STOP: 151 uORF 3′ STOP: 223 leader length: 411 |
| 2939 | AGI number: AT4G25320.1 uORF ′5 STOP: 171 uORF 3′ STOP: 228 leader length: 411 |
| 2940 | AGI number: AT4G25320.1 uORF ′5 STOP: 171 uORF 3′ STOP: 228 leader length: 411 |
| 2941 | AGI number: AT4G25390.2 uORF ′5 STOP: 72 uORF 3′ STOP: 249 leader length: 150 |
| 2942 | AGI number: AT4G25390.2 uORF ′5 STOP: 72 uORF 3′ STOP: 249 leader length: 150 |
| 2943 | AGI number: AT4G25670.1 uORF ′5 STOP: 168 uORF 3′ STOP: 363 leader length: 433 |
| 2944 | AGI number: AT4G25670.1 uORF ′5 STOP: 168 uORF 3′ STOP: 363 leader length: 433 |
| 2945 | AGI number: AT4G25670.2 uORF ′5 STOP: 1 uORF 3′ STOP: 184 leader length: 254 |
| 2946 | AGI number: AT4G25670.2 uORF ′5 STOP: 1 uORF 3′ STOP: 184 leader length: 254 |
| 2947 | AGI number: AT4G25690.1 uORF ′5 STOP: 52 uORF 3′ STOP: 277 leader length: 802 |
| 2948 | AGI number: AT4G25690.1 uORF ′5 STOP: 52 uORF 3′ STOP: 277 leader length: 802 |
| 2949 | AGI number: AT4G25690.1 uORF ′5 STOP: 239 uORF 3′ STOP: 296 leader length: 802 |
| 2950 | AGI number: AT4G25690.1 uORF ′5 STOP: 239 uORF 3′ STOP: 296 leader length: 802 |
| 2951 | AGI number: AT4G25690.1 uORF ′5 STOP: 551 uORF 3′ STOP: 728 leader length: 802 |
| 2952 | AGI number: AT4G25690.1 uORF ′5 STOP: 551 uORF 3′ STOP: 728 leader length: 802 |
| 2953 | AGI number: AT4G25690.1 uORF ′5 STOP: 606 uORF 3′ STOP: 699 leader length: 802 |
| 2954 | AGI number: AT4G25690.1 uORF ′5 STOP: 606 uORF 3′ STOP: 699 leader length: 802 |
| 2955 | AGI number: AT4G25690.2 uORF ′5 STOP: 51 uORF 3′ STOP: 258 leader length: 332 |
| 2956 | AGI number: AT4G25690.2 uORF ′5 STOP: 51 uORF 3′ STOP: 258 leader length: 332 |
| 2957 | AGI number: AT4G25690.2 uORF ′5 STOP: 136 uORF 3′ STOP: 229 leader length: 332 |
| 2958 | AGI number: AT4G25690.2 uORF ′5 STOP: 136 uORF 3′ STOP: 229 leader length: 332 |
| 2959 | AGI number: AT4G25692.1 uORF ′5 STOP: 56 uORF 3′ STOP: 125 leader length: 558 |
| 2960 | AGI number: AT4G25692.1 uORF ′5 STOP: 56 uORF 3′ STOP: 125 leader length: 558 |
| 2961 | AGI number: AT4G25692.1 uORF ′5 STOP: 51 uORF 3′ STOP: 276 leader length: 558 |
| 2962 | AGI number: AT4G25692.1 uORF ′5 STOP: 51 uORF 3′ STOP: 276 leader length: 558 |
| 2963 | AGI number: AT4G25692.1 uORF ′5 STOP: 238 uORF 3′ STOP: 295 leader length: 558 |
| 2964 | AGI number: AT4G25692.1 uORF ′5 STOP: 238 uORF 3′ STOP: 295 leader length: 558 |
| 2965 | AGI number: AT4G25692.1 uORF ′5 STOP: 292 uORF 3′ STOP: 343 leader length: 558 |
| 2966 | AGI number: AT4G25692.1 uORF ′5 STOP: 292 uORF 3′ STOP: 343 leader length: 558 |
| 2967 | AGI number: AT4G26100.1 uORF ′5 STOP: 19 uORF 3′ STOP: 124 leader length: 289 |
| 2968 | AGI number: AT4G26100.1 uORF ′5 STOP: 19 uORF 3′ STOP: 124 leader length: 289 |
| 2969 | AGI number: AT4G26270.1 uORF ′5 STOP: 33 uORF 3′ STOP: 132 leader length: 317 |
| 2970 | AGI number: AT4G26270.1 uORF ′5 STOP: 33 uORF 3′ STOP: 132 leader length: 317 |
| 2971 | AGI number: AT4G26320.1 uORF ′5 STOP: 50 uORF 3′ STOP: 269 leader length: 56 |
| 2972 | AGI number: AT4G26320.1 uORF ′5 STOP: 50 uORF 3′ STOP: 269 leader length: 56 |
| 2973 | AGI number: AT4G26520.1 uORF ′5 STOP: 68 uORF 3′ STOP: 152 leader length: 290 |
| 2974 | AGI number: AT4G26520.1 uORF ′5 STOP: 68 uORF 3′ STOP: 152 leader length: 290 |
| 2975 | AGI number: AT4G26520.1 uORF ′5 STOP: 82 uORF 3′ STOP: 133 leader length: 290 |
| 2976 | AGI number: AT4G26520.1 uORF ′5 STOP: 82 uORF 3′ STOP: 133 leader length: 290 |
| 2977 | AGI number: AT4G26650.1 uORF ′5 STOP: 21 uORF 3′ STOP: 75 leader length: 521 |
| 2978 | AGI number: AT4G26650.1 uORF ′5 STOP: 21 uORF 3′ STOP: 75 leader length: 521 |
| 2979 | AGI number: AT4G26850.1 uORF ′5 STOP: 141 uORF 3′ STOP: 393 leader length: 503 |
| 2980 | AGI number: AT4G26850.1 uORF ′5 STOP: 141 uORF 3′ STOP: 393 leader length: 503 |
| 2981 | AGI number: AT4G26850.1 uORF ′5 STOP: 265 uORF 3′ STOP: 400 leader length: 503 |
| 2982 | AGI number: AT4G26850.1 uORF ′5 STOP: 265 uORF 3′ STOP: 400 leader length: 503 |
| 2983 | AGI number: AT4G26850.1 uORF ′5 STOP: 314 uORF 3′ STOP: 371 leader length: 503 |
| 2984 | AGI number: AT4G26850.1 uORF ′5 STOP: 314 uORF 3′ STOP: 371 leader length: 503 |
| 2985 | AGI number: AT4G27010.2 uORF ′5 STOP: 347 uORF 3′ STOP: 419 leader length: 671 |
| 2986 | AGI number: AT4G27010.2 uORF ′5 STOP: 347 uORF 3′ STOP: 419 leader length: 671 |
| 2987 | AGI number: AT4G27040.1 uORF ′5 STOP: 336 uORF 3′ STOP: 435 leader length: 555 |
| 2988 | AGI number: AT4G27040.1 uORF ′5 STOP: 336 uORF 3′ STOP: 435 leader length: 555 |
| 2989 | AGI number: AT4G27040.2 uORF ′5 STOP: 79 uORF 3′ STOP: 157 leader length: 689 |
| 2990 | AGI number: AT4G27040.2 uORF ′5 STOP: 79 uORF 3′ STOP: 157 leader length: 689 |
| 2991 | AGI number: AT4G27040.2 uORF ′5 STOP: 105 uORF 3′ STOP: 168 leader length: 689 |
| 2992 | AGI number: AT4G27040.2 uORF ′5 STOP: 105 uORF 3′ STOP: 168 leader length: 689 |
| 2993 | AGI number: AT4G27040.2 uORF ′5 STOP: 154 uORF 3′ STOP: 205 leader length: 689 |
| 2994 | AGI number: AT4G27040.2 uORF ′5 STOP: 154 uORF 3′ STOP: 205 leader length: 689 |
| 2995 | AGI number: AT4G27040.4 uORF ′5 STOP: 222 uORF 3′ STOP: 279 leader length: 504 |
| 2996 | AGI number: AT4G27040.4 uORF ′5 STOP: 222 uORF 3′ STOP: 279 leader length: 504 |
| 2997 | AGI number: AT4G27050.1 uORF ′5 STOP: 93 uORF 3′ STOP: 258 leader length: 453 |
| 2998 | AGI number: AT4G27050.1 uORF ′5 STOP: 93 uORF 3′ STOP: 258 leader length: 453 |
| 2999 | AGI number: AT4G27050.1 uORF ′5 STOP: 97 uORF 3′ STOP: 151 leader length: 453 |
| 3000 | AGI number: AT4G27050.1 uORF ′5 STOP: 97 uORF 3′ STOP: 151 leader length: 453 |
| 3001 | AGI number: AT4G27050.1 uORF ′5 STOP: 181 uORF 3′ STOP: 268 leader length: 453 |
| 3002 | AGI number: AT4G27050.1 uORF ′5 STOP: 181 uORF 3′ STOP: 268 leader length: 453 |
| 3003 | AGI number: AT4G27050.2 uORF ′5 STOP: 35 uORF 3′ STOP: 200 leader length: 477 |
| 3004 | AGI number: AT4G27050.2 uORF ′5 STOP: 35 uORF 3′ STOP: 200 leader length: 477 |
| 3005 | AGI number: AT4G27050.2 uORF ′5 STOP: 123 uORF 3′ STOP: 210 leader length: 477 |
| 3006 | AGI number: AT4G27050.2 uORF ′5 STOP: 123 uORF 3′ STOP: 210 leader length: 477 |
| 3007 | AGI number: AT4G27050.2 uORF ′5 STOP: 331 uORF 3′ STOP: 406 leader length: 477 |
| 3008 | AGI number: AT4G27050.2 uORF ′5 STOP: 331 uORF 3′ STOP: 406 leader length: 477 |
| 3009 | AGI number: AT4G27050.2 uORF ′5 STOP: 339 uORF 3′ STOP: 420 leader length: 477 |
| 3010 | AGI number: AT4G27050.2 uORF ′5 STOP: 339 uORF 3′ STOP: 420 leader length: 477 |
| 3011 | AGI number: AT4G27050.3 uORF ′5 STOP: 93 uORF 3′ STOP: 219 leader length: 290 |
| 3012 | AGI number: AT4G27050.3 uORF ′5 STOP: 93 uORF 3′ STOP: 219 leader length: 290 |
| 3013 | AGI number: AT4G27080.2 uORF ′5 STOP: 65 uORF 3′ STOP: 143 leader length: 84 |
| 3014 | AGI number: AT4G27080.2 uORF ′5 STOP: 65 uORF 3′ STOP: 143 leader length: 84 |
| 3015 | AGI number: AT4G27080.2 uORF ′5 STOP: 39 uORF 3′ STOP: 117 leader length: 84 |
| 3016 | AGI number: AT4G27080.2 uORF ′5 STOP: 39 uORF 3′ STOP: 117 leader length: 84 |
| 3017 | AGI number: AT4G27610.3 uORF ′5 STOP: 334 uORF 3′ STOP: 451 leader length: 1078 |
| 3018 | AGI number: AT4G27610.3 uORF ′5 STOP: 334 uORF 3′ STOP: 451 leader length: 1078 |
| 3019 | AGI number: AT4G27610.3 uORF ′5 STOP: 383 uORF 3′ STOP: 473 leader length: 1078 |
| 3020 | AGI number: AT4G27610.3 uORF ′5 STOP: 383 uORF 3′ STOP: 473 leader length: 1078 |
| 3021 | AGI number: AT4G27610.3 uORF ′5 STOP: 429 uORF 3′ STOP: 495 leader length: 1078 |
| 3022 | AGI number: AT4G27610.3 uORF ′5 STOP: 429 uORF 3′ STOP: 495 leader length: 1078 |
| 3023 | AGI number: AT4G27840.1 uORF ′5 STOP: 24 uORF 3′ STOP: 87 leader length: 237 |
| 3024 | AGI number: AT4G27840.1 uORF ′5 STOP: 24 uORF 3′ STOP: 87 leader length: 237 |
| 3025 | AGI number: AT4G28040.4 uORF ′5 STOP: 63 uORF 3′ STOP: 165 leader length: 288 |
| 3026 | AGI number: AT4G28040.4 uORF ′5 STOP: 63 uORF 3′ STOP: 165 leader length: 288 |
| 3027 | AGI number: AT4G28260.1 uORF ′5 STOP: 21 uORF 3′ STOP: 315 leader length: 563 |
| 3028 | AGI number: AT4G28260.1 uORF ′5 STOP: 21 uORF 3′ STOP: 315 leader length: 563 |
| 3029 | AGI number: AT4G28260.1 uORF ′5 STOP: 227 uORF 3′ STOP: 305 leader length: 563 |
| 3030 | AGI number: AT4G28260.1 uORF ′5 STOP: 227 uORF 3′ STOP: 305 leader length: 563 |
| 3031 | AGI number: AT4G28260.2 uORF ′5 STOP: 21 uORF 3′ STOP: 315 leader length: 474 |
| 3032 | AGI number: AT4G28260.2 uORF ′5 STOP: 21 uORF 3′ STOP: 315 leader length: 474 |
| 3033 | AGI number: AT4G28260.2 uORF ′5 STOP: 227 uORF 3′ STOP: 305 leader length: 474 |
| 3034 | AGI number: AT4G28260.2 uORF ′5 STOP: 227 uORF 3′ STOP: 305 leader length: 474 |
| 3035 | AGI number: AT4G28300.2 uORF ′5 STOP: 119 uORF 3′ STOP: 383 leader length: 741 |
| 3036 | AGI number: AT4G28300.2 uORF ′5 STOP: 119 uORF 3′ STOP: 383 leader length: 741 |
| 3037 | AGI number: AT4G28300.2 uORF ′5 STOP: 295 uORF 3′ STOP: 349 leader length: 741 |
| 3038 | AGI number: AT4G28300.2 uORF ′5 STOP: 295 uORF 3′ STOP: 349 leader length: 741 |
| 3039 | AGI number: AT4G28480.1 uORF ′5 STOP: 6 uORF 3′ STOP: 69 leader length: 268 |
| 3040 | AGI number: AT4G28480.1 uORF ′5 STOP: 6 uORF 3′ STOP: 69 leader length: 268 |
| 3041 | AGI number: AT4G28480.2 uORF ′5 STOP: 6 uORF 3′ STOP: 69 leader length: 268 |
| 3042 | AGI number: AT4G28480.2 uORF ′5 STOP: 6 uORF 3′ STOP: 69 leader length: 268 |
| 3043 | AGI number: AT4G29160.2 uORF ′5 STOP: 220 uORF 3′ STOP: 274 leader length: 546 |
| 3044 | AGI number: AT4G29160.2 uORF ′5 STOP: 220 uORF 3′ STOP: 274 leader length: 546 |
| 3045 | AGI number: AT4G29160.2 uORF ′5 STOP: 188 uORF 3′ STOP: 257 leader length: 546 |
| 3046 | AGI number: AT4G29160.2 uORF ′5 STOP: 188 uORF 3′ STOP: 257 leader length: 546 |
| 3047 | AGI number: AT4G30020.1 uORF ′5 STOP: 57 uORF 3′ STOP: 210 leader length: 315 |
| 3048 | AGI number: AT4G30020.1 uORF ′5 STOP: 57 uORF 3′ STOP: 210 leader length: 315 |
| 3049 | AGI number: AT4G30160.1 uORF ′5 STOP: 109 uORF 3′ STOP: 160 leader length: 486 |
| 3050 | AGI number: AT4G30160.1 uORF ′5 STOP: 109 uORF 3′ STOP: 160 leader length: 486 |
| 3051 | AGI number: AT4G30630.1 uORF ′5 STOP: 94 uORF 3′ STOP: 283 leader length: 410 |
| 3052 | AGI number: AT4G30630.1 uORF ′5 STOP: 94 uORF 3′ STOP: 283 leader length: 410 |
| 3053 | AGI number: AT4G30710.1 uORF ′5 STOP: 355 uORF 3′ STOP: 409 leader length: 652 |
| 3054 | AGI number: AT4G30710.1 uORF ′5 STOP: 355 uORF 3′ STOP: 409 leader length: 652 |
| 3055 | AGI number: AT4G30900.1 uORF ′5 STOP: 109 uORF 3′ STOP: 163 leader length: 386 |
| 3056 | AGI number: AT4G30900.1 uORF ′5 STOP: 109 uORF 3′ STOP: 163 leader length: 386 |
| 3057 | AGI number: AT4G30900.2 uORF ′5 STOP: 86 uORF 3′ STOP: 137 leader length: 461 |
| 3058 | AGI number: AT4G30900.2 uORF ′5 STOP: 86 uORF 3′ STOP: 137 leader length: 461 |
| 3059 | AGI number: AT4G30900.2 uORF ′5 STOP: 235 uORF 3′ STOP: 370 leader length: 461 |
| 3060 | AGI number: AT4G30900.2 uORF ′5 STOP: 235 uORF 3′ STOP: 370 leader length: 461 |
| 3061 | AGI number: AT4G30960.1 uORF ′5 STOP: 111 uORF 3′ STOP: 231 leader length: 347 |
| 3062 | AGI number: AT4G30960.1 uORF ′5 STOP: 111 uORF 3′ STOP: 231 leader length: 347 |
| 3063 | AGI number: AT4G30960.1 uORF ′5 STOP: 151 uORF 3′ STOP: 244 leader length: 347 |
| 3064 | AGI number: AT4G30960.1 uORF ′5 STOP: 151 uORF 3′ STOP: 244 leader length: 347 |
| 3065 | AGI number: AT4G31820.1 uORF ′5 STOP: 362 uORF 3′ STOP: 485 leader length: 803 |
| 3066 | AGI number: AT4G31820.1 uORF ′5 STOP: 362 uORF 3′ STOP: 485 leader length: 803 |
| 3067 | AGI number: AT4G31880.1 uORF ′5 STOP: 83 uORF 3′ STOP: 149 leader length: 244 |
| 3068 | AGI number: AT4G31880.1 uORF ′5 STOP: 83 uORF 3′ STOP: 149 leader length: 244 |
| 3069 | AGI number: AT4G31880.2 uORF ′5 STOP: 43 uORF 3′ STOP: 217 leader length: 326 |
| 3070 | AGI number: AT4G31880.2 uORF ′5 STOP: 43 uORF 3′ STOP: 217 leader length: 326 |
| 3071 | AGI number: AT4G31880.2 uORF ′5 STOP: 165 uORF 3′ STOP: 231 leader length: 326 |
| 3072 | AGI number: AT4G31880.2 uORF ′5 STOP: 165 uORF 3′ STOP: 231 leader length: 326 |
| 3073 | AGI number: AT4G31990.1 uORF ′5 STOP: 2 uORF 3′ STOP: 68 leader length: 227 |
| 3074 | AGI number: AT4G31990.1 uORF ′5 STOP: 2 uORF 3′ STOP: 68 leader length: 227 |
| 3075 | AGI number: AT4G31990.1 uORF ′5 STOP: 13 uORF 3′ STOP: 82 leader length: 227 |
| 3076 | AGI number: AT4G31990.1 uORF ′5 STOP: 13 uORF 3′ STOP: 82 leader length: 227 |
| 3077 | AGI number: AT4G32300.1 uORF ′5 STOP: 94 uORF 3′ STOP: 145 leader length: 495 |
| 3078 | AGI number: AT4G32300.1 uORF ′5 STOP: 94 uORF 3′ STOP: 145 leader length: 495 |
| 3079 | AGI number: AT4G32850.3 uORF ′5 STOP: 52 uORF 3′ STOP: 109 leader length: 354 |
| 3080 | AGI number: AT4G32850.3 uORF ′5 STOP: 52 uORF 3′ STOP: 109 leader length: 354 |
| 3081 | AGI number: AT4G32980.1 uORF ′5 STOP: 190 uORF 3′ STOP: 316 leader length: 703 |
| 3082 | AGI number: AT4G32980.1 uORF ′5 STOP: 190 uORF 3′ STOP: 316 leader length: 703 |
| 3083 | AGI number: AT4G32980.1 uORF ′5 STOP: 527 uORF 3′ STOP: 620 leader length: 703 |
| 3084 | AGI number: AT4G32980.1 uORF ′5 STOP: 527 uORF 3′ STOP: 620 leader length: 703 |
| 3085 | AGI number: AT4G33050.2 uORF ′5 STOP: 125 uORF 3′ STOP: 206 leader length: 194 |
| 3086 | AGI number: AT4G33050.2 uORF ′5 STOP: 125 uORF 3′ STOP: 206 leader length: 194 |
| 3087 | AGI number: AT4G33160.1 uORF ′5 STOP: 26 uORF 3′ STOP: 92 leader length: 71 |
| 3088 | AGI number: AT4G33160.1 uORF ′5 STOP: 26 uORF 3′ STOP: 92 leader length: 71 |
| 3089 | AGI number: AT4G33240.1 uORF ′5 STOP: 207 uORF 3′ STOP: 261 leader length: 260 |
| 3090 | AGI number: AT4G33240.1 uORF ′5 STOP: 207 uORF 3′ STOP: 261 leader length: 260 |
| 3091 | AGI number: AT4G33950.2 uORF ′5 STOP: 251 uORF 3′ STOP: 566 leader length: 604 |
| 3092 | AGI number: AT4G33950.2 uORF ′5 STOP: 251 uORF 3′ STOP: 566 leader length: 604 |
| 3093 | AGI number: AT4G34160.1 uORF ′5 STOP: 83 uORF 3′ STOP: 176 leader length: 264 |
| 3094 | AGI number: AT4G34160.1 uORF ′5 STOP: 83 uORF 3′ STOP: 176 leader length: 264 |
| 3095 | AGI number: AT4G34160.1 uORF ′5 STOP: 102 uORF 3′ STOP: 168 leader length: 264 |
| 3096 | AGI number: AT4G34160.1 uORF ′5 STOP: 102 uORF 3′ STOP: 168 leader length: 264 |
| 3097 | AGI number: AT4G34420.1 uORF ′5 STOP: 58 uORF 3′ STOP: 139 leader length: 362 |
| 3098 | AGI number: AT4G34420.1 uORF ′5 STOP: 58 uORF 3′ STOP: 139 leader length: 362 |
| 3099 | AGI number: AT4G34460.2 uORF ′5 STOP: 381 uORF 3′ STOP: 444 leader length: 663 |
| 3100 | AGI number: AT4G34460.2 uORF ′5 STOP: 381 uORF 3′ STOP: 444 leader length: 663 |
| 3101 | AGI number: AT4G34540.1 uORF ′5 STOP: 983 uORF 3′ STOP: 1076 leader length: 1642 |
| 3102 | AGI number: AT4G34540.1 uORF ′5 STOP: 983 uORF 3′ STOP: 1076 leader length: 1642 |
| 3103 | AGI number: AT4G34560.1 uORF ′5 STOP: 140 uORF 3′ STOP: 212 leader length: 288 |
| 3104 | AGI number: AT4G34560.1 uORF ′5 STOP: 140 uORF 3′ STOP: 212 leader length: 288 |
| 3105 | AGI number: AT4G34590.1 uORF ′5 STOP: 202 uORF 3′ STOP: 367 leader length: 588 |
| 3106 | AGI number: AT4G34590.1 uORF ′5 STOP: 202 uORF 3′ STOP: 367 leader length: 588 |
| 3107 | AGI number: AT4G34590.1 uORF ′5 STOP: 284 uORF 3′ STOP: 374 leader length: 588 |
| 3108 | AGI number: AT4G34590.1 uORF ′5 STOP: 284 uORF 3′ STOP: 374 leader length: 588 |
| 3109 | AGI number: AT4G34710.1 uORF ′5 STOP: 43 uORF 3′ STOP: 331 leader length: 519 |
| 3110 | AGI number: AT4G34710.1 uORF ′5 STOP: 43 uORF 3′ STOP: 331 leader length: 519 |
| 3111 | AGI number: AT4G34710.1 uORF ′5 STOP: 177 uORF 3′ STOP: 339 leader length: 519 |
| 3112 | AGI number: AT4G34710.1 uORF ′5 STOP: 177 uORF 3′ STOP: 339 leader length: 519 |
| 3113 | AGI number: AT4G34710.2 uORF ′5 STOP: 5 uORF 3′ STOP: 293 leader length: 384 |
| 3114 | AGI number: AT4G34710.2 uORF ′5 STOP: 5 uORF 3′ STOP: 293 leader length: 384 |
| 3115 | AGI number: AT4G34710.2 uORF ′5 STOP: 139 uORF 3′ STOP: 301 leader length: 384 |
| 3116 | AGI number: AT4G34710.2 uORF ′5 STOP: 139 uORF 3′ STOP: 301 leader length: 384 |
| 3117 | AGI number: AT4G34881.1 uORF ′5 STOP: 104 uORF 3′ STOP: 236 leader length: 269 |
| 3118 | AGI number: AT4G34881.1 uORF ′5 STOP: 104 uORF 3′ STOP: 236 leader length: 269 |
| 3119 | AGI number: AT4G35020.2 uORF ′5 STOP: 267 uORF 3′ STOP: 354 leader length: 517 |
| 3120 | AGI number: AT4G35020.2 uORF ′5 STOP: 267 uORF 3′ STOP: 354 leader length: 517 |
| 3121 | AGI number: AT4G35020.3 uORF ′5 STOP: 47 uORF 3′ STOP: 122 leader length: 285 |
| 3122 | AGI number: AT4G35020.3 uORF ′5 STOP: 47 uORF 3′ STOP: 122 leader length: 285 |
| 3123 | AGI number: AT4G35040.1 uORF ′5 STOP: 80 uORF 3′ STOP: 131 leader length: 400 |
| 3124 | AGI number: AT4G35040.1 uORF ′5 STOP: 80 uORF 3′ STOP: 131 leader length: 400 |
| 3125 | AGI number: AT4G35390.1 uORF ′5 STOP: 15 uORF 3′ STOP: 90 leader length: 277 |
| 3126 | AGI number: AT4G35390.1 uORF ′5 STOP: 15 uORF 3′ STOP: 90 leader length: 277 |
| 3127 | AGI number: AT4G35470.1 uORF ′5 STOP: 33 uORF 3′ STOP: 129 leader length: 230 |
| 3128 | AGI number: AT4G35470.1 uORF ′5 STOP: 33 uORF 3′ STOP: 129 leader length: 230 |
| 3129 | AGI number: AT4G35860.2 uORF ′5 STOP: 22 uORF 3′ STOP: 259 leader length: 460 |
| 3130 | AGI number: AT4G35860.2 uORF ′5 STOP: 22 uORF 3′ STOP: 259 leader length: 460 |
| 3131 | AGI number: AT4G35860.2 uORF ′5 STOP: 62 uORF 3′ STOP: 284 leader length: 460 |
| 3132 | AGI number: AT4G35860.2 uORF ′5 STOP: 62 uORF 3′ STOP: 284 leader length: 460 |
| 3133 | AGI number: AT4G35860.2 uORF ′5 STOP: 174 uORF 3′ STOP: 240 leader length: 460 |
| 3134 | AGI number: AT4G35860.2 uORF ′5 STOP: 174 uORF 3′ STOP: 240 leader length: 460 |
| 3135 | AGI number: AT4G35920.2 uORF ′5 STOP: 18 uORF 3′ STOP: 69 leader length: 350 |
| 3136 | AGI number: AT4G35920.2 uORF ′5 STOP: 18 uORF 3′ STOP: 69 leader length: 350 |
| 3137 | AGI number: AT4G35940.2 uORF ′5 STOP: 97 uORF 3′ STOP: 160 leader length: 100 |
| 3138 | AGI number: AT4G35940.2 uORF ′5 STOP: 97 uORF 3′ STOP: 160 leader length: 100 |
| 3139 | AGI number: AT4G36050.1 uORF ′5 STOP: 523 uORF 3′ STOP: 577 leader length: 699 |
| 3140 | AGI number: AT4G36050.1 uORF ′5 STOP: 523 uORF 3′ STOP: 577 leader length: 699 |
| 3141 | AGI number: AT4G36050.1 uORF ′5 STOP: 527 uORF 3′ STOP: 581 leader length: 699 |
| 3142 | AGI number: AT4G36050.1 uORF ′5 STOP: 527 uORF 3′ STOP: 581 leader length: 699 |
| 3143 | AGI number: AT4G36090.2 uORF ′5 STOP: 115 uORF 3′ STOP: 274 leader length: 601 |
| 3144 | AGI number: AT4G36090.2 uORF ′5 STOP: 115 uORF 3′ STOP: 274 leader length: 601 |
| 3145 | AGI number: AT4G36620.1 uORF ′5 STOP: 80 uORF 3′ STOP: 242 leader length: 81 |
| 3146 | AGI number: AT4G36620.1 uORF ′5 STOP: 80 uORF 3′ STOP: 242 leader length: 81 |
| 3147 | AGI number: AT4G36840.1 uORF ′5 STOP: 648 uORF 3′ STOP: 705 leader length: 813 |
| 3148 | AGI number: AT4G36840.1 uORF ′5 STOP: 648 uORF 3′ STOP: 705 leader length: 813 |
| 3149 | AGI number: AT4G36960.2 uORF ′5 STOP: 65 uORF 3′ STOP: 227 leader length: 366 |
| 3150 | AGI number: AT4G36960.2 uORF ′5 STOP: 65 uORF 3′ STOP: 227 leader length: 366 |
| 3151 | AGI number: AT4G37080.3 uORF ′5 STOP: 73 uORF 3′ STOP: 139 leader length: 407 |
| 3152 | AGI number: AT4G37080.3 uORF ′5 STOP: 73 uORF 3′ STOP: 139 leader length: 407 |
| 3153 | AGI number: AT4G37590.1 uORF ′5 STOP: 704 uORF 3′ STOP: 773 leader length: 870 |
| 3154 | AGI number: AT4G37590.1 uORF ′5 STOP: 704 uORF 3′ STOP: 773 leader length: 870 |
| 3155 | AGI number: AT4G37608.1 uORF ′5 STOP: 25 uORF 3′ STOP: 133 leader length: 199 |
| 3156 | AGI number: AT4G37608.1 uORF ′5 STOP: 25 uORF 3′ STOP: 133 leader length: 199 |
| 3157 | AGI number: AT4G37690.1 uORF ′5 STOP: 358 uORF 3′ STOP: 694 leader length: 409 |
| 3158 | AGI number: AT4G37690.1 uORF ′5 STOP: 358 uORF 3′ STOP: 694 leader length: 409 |
| 3159 | AGI number: AT4G37750.1 uORF ′5 STOP: 54 uORF 3′ STOP: 168 leader length: 268 |
| 3160 | AGI number: AT4G37750.1 uORF ′5 STOP: 54 uORF 3′ STOP: 168 leader length: 268 |
| 3161 | AGI number: AT4G38260.1 uORF ′5 STOP: 13 uORF 3′ STOP: 97 leader length: 518 |
| 3162 | AGI number: AT4G38260.1 uORF ′5 STOP: 13 uORF 3′ STOP: 97 leader length: 518 |
| 3163 | AGI number: AT4G38260.1 uORF ′5 STOP: 214 uORF 3′ STOP: 307 leader length: 518 |
| 3164 | AGI number: AT4G38260.1 uORF ′5 STOP: 214 uORF 3′ STOP: 307 leader length: 518 |
| 3165 | AGI number: AT4G38330.1 uORF ′5 STOP: 180 uORF 3′ STOP: 264 leader length: 269 |
| 3166 | AGI number: AT4G38330.1 uORF ′5 STOP: 180 uORF 3′ STOP: 264 leader length: 269 |
| 3167 | AGI number: AT4G38520.1 uORF ′5 STOP: 368 uORF 3′ STOP: 668 leader length: 527 |
| 3168 | AGI number: AT4G38520.1 uORF ′5 STOP: 368 uORF 3′ STOP: 668 leader length: 527 |
| 3169 | AGI number: AT4G38520.2 uORF ′5 STOP: 198 uORF 3′ STOP: 351 leader length: 759 |
| 3170 | AGI number: AT4G38520.2 uORF ′5 STOP: 198 uORF 3′ STOP: 351 leader length: 759 |
| 3171 | AGI number: AT4G38520.2 uORF ′5 STOP: 181 uORF 3′ STOP: 331 leader length: 759 |
| 3172 | AGI number: AT4G38520.2 uORF ′5 STOP: 181 uORF 3′ STOP: 331 leader length: 759 |
| 3173 | AGI number: AT4G38520.2 uORF ′5 STOP: 600 uORF 3′ STOP: 900 leader length: 759 |
| 3174 | AGI number: AT4G38520.2 uORF ′5 STOP: 600 uORF 3′ STOP: 900 leader length: 759 |
| 3175 | AGI number: AT4G38950.1 uORF ′5 STOP: 533 uORF 3′ STOP: 674 leader length: 581 |
| 3176 | AGI number: AT4G38950.1 uORF ′5 STOP: 533 uORF 3′ STOP: 674 leader length: 581 |
| 3177 | AGI number: AT4G38960.3 uORF ′5 STOP: 401 uORF 3′ STOP: 551 leader length: 488 |
| 3178 | AGI number: AT4G38960.3 uORF ′5 STOP: 401 uORF 3′ STOP: 551 leader length: 488 |
| 3179 | AGI number: AT4G39050.1 uORF ′5 STOP: 57 uORF 3′ STOP: 234 leader length: 327 |
| 3180 | AGI number: AT4G39050.1 uORF ′5 STOP: 57 uORF 3′ STOP: 234 leader length: 327 |
| 3181 | AGI number: AT4G39180.1 uORF ′5 STOP: 169 uORF 3′ STOP: 331 leader length: 424 |
| 3182 | AGI number: AT4G39180.1 uORF ′5 STOP: 169 uORF 3′ STOP: 331 leader length: 424 |
| 3183 | AGI number: AT4G39180.1 uORF ′5 STOP: 177 uORF 3′ STOP: 390 leader length: 424 |
| 3184 | AGI number: AT4G39180.1 uORF ′5 STOP: 177 uORF 3′ STOP: 390 leader length: 424 |
| 3185 | AGI number: AT4G39190.1 uORF ′5 STOP: 41 uORF 3′ STOP: 104 leader length: 208 |
| 3186 | AGI number: AT4G39190.1 uORF ′5 STOP: 41 uORF 3′ STOP: 104 leader length: 208 |
| 3187 | AGI number: AT4G39270.2 uORF ′5 STOP: 29 uORF 3′ STOP: 101 leader length: 369 |
| 3188 | AGI number: AT4G39270.2 uORF ′5 STOP: 29 uORF 3′ STOP: 101 leader length: 369 |
| 3189 | AGI number: AT4G39390.1 uORF ′5 STOP: 132 uORF 3′ STOP: 192 leader length: 301 |
| 3190 | AGI number: AT4G39390.1 uORF ′5 STOP: 132 uORF 3′ STOP: 192 leader length: 301 |
| 3191 | AGI number: AT4G39390.1 uORF ′5 STOP: 124 uORF 3′ STOP: 181 leader length: 301 |
| 3192 | AGI number: AT4G39390.1 uORF ′5 STOP: 124 uORF 3′ STOP: 181 leader length: 301 |
| 3193 | AGI number: AT4G39390.2 uORF ′5 STOP: 68 uORF 3′ STOP: 125 leader length: 223 |
| 3194 | AGI number: AT4G39390.2 uORF ′5 STOP: 68 uORF 3′ STOP: 125 leader length: 223 |
| 3195 | AGI number: AT4G39390.2 uORF ′5 STOP: 76 uORF 3′ STOP: 136 leader length: 223 |
| 3196 | AGI number: AT4G39390.2 uORF ′5 STOP: 76 uORF 3′ STOP: 136 leader length: 223 |
| 3197 | AGI number: AT4G39390.3 uORF ′5 STOP: 102 uORF 3′ STOP: 162 leader length: 356 |
| 3198 | AGI number: AT4G39390.3 uORF ′5 STOP: 102 uORF 3′ STOP: 162 leader length: 356 |
| 3199 | AGI number: AT4G39390.3 uORF ′5 STOP: 94 uORF 3′ STOP: 151 leader length: 356 |
| 3200 | AGI number: AT4G39390.3 uORF ′5 STOP: 94 uORF 3′ STOP: 151 leader length: 356 |
| 3201 | AGI number: AT4G39420.1 uORF ′5 STOP: 19 uORF 3′ STOP: 145 leader length: 242 |
| 3202 | AGI number: AT4G39420.1 uORF ′5 STOP: 19 uORF 3′ STOP: 145 leader length: 242 |
| 3203 | AGI number: AT4G39420.2 uORF ′5 STOP: 19 uORF 3′ STOP: 145 leader length: 242 |
| 3204 | AGI number: AT4G39420.2 uORF ′5 STOP: 19 uORF 3′ STOP: 145 leader length: 242 |
| 3205 | AGI number: AT4G39680.1 uORF ′5 STOP: 32 uORF 3′ STOP: 125 leader length: 266 |
| 3206 | AGI number: AT4G39680.1 uORF ′5 STOP: 32 uORF 3′ STOP: 125 leader length: 266 |
| 3207 | AGI number: AT4G39680.2 uORF ′5 STOP: 32 uORF 3′ STOP: 125 leader length: 207 |
| 3208 | AGI number: AT4G39680.2 uORF ′5 STOP: 32 uORF 3′ STOP: 125 leader length: 207 |
| 3209 | AGI number: AT4G40030.3 uORF ′5 STOP: 30 uORF 3′ STOP: 84 leader length: 372 |
| 3210 | AGI number: AT4G40030.3 uORF ′5 STOP: 30 uORF 3′ STOP: 84 leader length: 372 |
| 3211 | AGI number: AT4G40030.3 uORF ′5 STOP: 171 uORF 3′ STOP: 246 leader length: 372 |
| 3212 | AGI number: AT4G40030.3 uORF ′5 STOP: 171 uORF 3′ STOP: 246 leader length: 372 |
| 3213 | AGI number: AT4G40040.2 uORF ′5 STOP: 23 uORF 3′ STOP: 86 leader length: 262 |
| 3214 | AGI number: AT4G40040.2 uORF ′5 STOP: 23 uORF 3′ STOP: 86 leader length: 262 |
| 3215 | AGI number: AT4G40040.2 uORF ′5 STOP: 30 uORF 3′ STOP: 123 leader length: 262 |
| 3216 | AGI number: AT4G40040.2 uORF ′5 STOP: 30 uORF 3′ STOP: 123 leader length: 262 |
| 3217 | AGI number: AT5G01100.1 uORF ′5 STOP: 22 uORF 3′ STOP: 145 leader length: 192 |
| 3218 | AGI number: AT5G01100.1 uORF ′5 STOP: 22 uORF 3′ STOP: 145 leader length: 192 |
| 3219 | AGI number: AT5G01100.1 uORF ′5 STOP: 129 uORF 3′ STOP: 279 leader length: 192 |
| 3220 | AGI number: AT5G01100.1 uORF ′5 STOP: 129 uORF 3′ STOP: 279 leader length: 192 |
| 3221 | AGI number: AT5G01300.2 uORF ′5 STOP: 68 uORF 3′ STOP: 152 leader length: 379 |
| 3222 | AGI number: AT5G01300.2 uORF ′5 STOP: 68 uORF 3′ STOP: 152 leader length: 379 |
| 3223 | AGI number: AT5G01380.1 uORF ′5 STOP: 149 uORF 3′ STOP: 212 leader length: 150 |
| 3224 | AGI number: AT5G01380.1 uORF ′5 STOP: 149 uORF 3′ STOP: 212 leader length: 150 |
| 3225 | AGI number: AT5G01520.1 uORF ′5 STOP: 103 uORF 3′ STOP: 235 leader length: 365 |
| 3226 | AGI number: AT5G01520.1 uORF ′5 STOP: 103 uORF 3′ STOP: 235 leader length: 365 |
| 3227 | AGI number: AT5G01520.1 uORF ′5 STOP: 167 uORF 3′ STOP: 254 leader length: 365 |
| 3228 | AGI number: AT5G01520.1 uORF ′5 STOP: 167 uORF 3′ STOP: 254 leader length: 365 |
| 3229 | AGI number: AT5G01520.2 uORF ′5 STOP: 103 uORF 3′ STOP: 235 leader length: 365 |
| 3230 | AGI number: AT5G01520.2 uORF ′5 STOP: 103 uORF 3′ STOP: 235 leader length: 365 |
| 3231 | AGI number: AT5G01520.2 uORF ′5 STOP: 167 uORF 3′ STOP: 254 leader length: 365 |
| 3232 | AGI number: AT5G01520.2 uORF ′5 STOP: 167 uORF 3′ STOP: 254 leader length: 365 |
| 3233 | AGI number: AT5G01710.1 uORF ′5 STOP: 222 uORF 3′ STOP: 285 leader length: 383 |
| 3234 | AGI number: AT5G01710.1 uORF ′5 STOP: 222 uORF 3′ STOP: 285 leader length: 383 |
| 3235 | AGI number: AT5G01810.1 uORF ′5 STOP: 100 uORF 3′ STOP: 340 leader length: 464 |
| 3236 | AGI number: AT5G01810.1 uORF ′5 STOP: 100 uORF 3′ STOP: 340 leader length: 464 |
| 3237 | AGI number: AT5G01810.1 uORF ′5 STOP: 251 uORF 3′ STOP: 365 leader length: 464 |
| 3238 | AGI number: AT5G01810.1 uORF ′5 STOP: 251 uORF 3′ STOP: 365 leader length: 464 |
| 3239 | AGI number: AT5G01810.2 uORF ′5 STOP: 212 uORF 3′ STOP: 452 leader length: 576 |
| 3240 | AGI number: AT5G01810.2 uORF ′5 STOP: 212 uORF 3′ STOP: 452 leader length: 576 |
| 3241 | AGI number: AT5G01810.2 uORF ′5 STOP: 363 uORF 3′ STOP: 477 leader length: 576 |
| 3242 | AGI number: AT5G01810.2 uORF ′5 STOP: 363 uORF 3′ STOP: 477 leader length: 576 |
| 3243 | AGI number: AT5G01810.3 uORF ′5 STOP: 212 uORF 3′ STOP: 452 leader length: 576 |
| 3244 | AGI number: AT5G01810.3 uORF ′5 STOP: 212 uORF 3′ STOP: 452 leader length: 576 |
| 3245 | AGI number: AT5G01810.3 uORF ′5 STOP: 363 uORF 3′ STOP: 477 leader length: 576 |
| 3246 | AGI number: AT5G01810.3 uORF ′5 STOP: 363 uORF 3′ STOP: 477 leader length: 576 |
| 3247 | AGI number: AT5G01830.1 uORF ′5 STOP: 133 uORF 3′ STOP: 187 leader length: 288 |
| 3248 | AGI number: AT5G01830.1 uORF ′5 STOP: 133 uORF 3′ STOP: 187 leader length: 288 |
| 3249 | AGI number: AT5G02060.1 uORF ′5 STOP: 82 uORF 3′ STOP: 235 leader length: 344 |
| 3250 | AGI number: AT5G02060.1 uORF ′5 STOP: 82 uORF 3′ STOP: 235 leader length: 344 |
| 3251 | AGI number: AT5G02480.1 uORF ′5 STOP: 263 uORF 3′ STOP: 404 leader length: 589 |
| 3252 | AGI number: AT5G02480.1 uORF ′5 STOP: 263 uORF 3′ STOP: 404 leader length: 589 |
| 3253 | AGI number: AT5G02550.1 uORF ′5 STOP: 77 uORF 3′ STOP: 341 leader length: 81 |
| 3254 | AGI number: AT5G02550.1 uORF ′5 STOP: 77 uORF 3′ STOP: 341 leader length: 81 |
| 3255 | AGI number: AT5G02650.1 uORF ′5 STOP: 244 uORF 3′ STOP: 367 leader length: 307 |
| 3256 | AGI number: AT5G02650.1 uORF ′5 STOP: 244 uORF 3′ STOP: 367 leader length: 307 |
| 3257 | AGI number: AT5G02680.1 uORF ′5 STOP: 16 uORF 3′ STOP: 190 leader length: 173 |
| 3258 | AGI number: AT5G02680.1 uORF ′5 STOP: 16 uORF 3′ STOP: 190 leader length: 173 |
| 3259 | AGI number: AT5G03190.1 uORF ′5 STOP: 251 uORF 3′ STOP: 344 leader length: 419 |
| 3260 | AGI number: AT5G03190.1 uORF ′5 STOP: 251 uORF 3′ STOP: 344 leader length: 419 |
| 3261 | AGI number: AT5G03190.1 uORF ′5 STOP: 301 uORF 3′ STOP: 355 leader length: 419 |
| 3262 | AGI number: AT5G03190.1 uORF ′5 STOP: 301 uORF 3′ STOP: 355 leader length: 419 |
| 3263 | AGI number: AT5G03240.3 uORF ′5 STOP: 178 uORF 3′ STOP: 274 leader length: 417 |
| 3264 | AGI number: AT5G03240.3 uORF ′5 STOP: 178 uORF 3′ STOP: 274 leader length: 417 |
| 3265 | AGI number: AT5G03240.3 uORF ′5 STOP: 93 uORF 3′ STOP: 258 leader length: 417 |
| 3266 | AGI number: AT5G03240.3 uORF ′5 STOP: 93 uORF 3′ STOP: 258 leader length: 417 |
| 3267 | AGI number: AT5G03280.1 uORF ′5 STOP: 98 uORF 3′ STOP: 284 leader length: 628 |
| 3268 | AGI number: AT5G03280.1 uORF ′5 STOP: 98 uORF 3′ STOP: 284 leader length: 628 |
| 3269 | AGI number: AT5G03330.1 uORF ′5 STOP: 157 uORF 3′ STOP: 211 leader length: 295 |
| 3270 | AGI number: AT5G03330.1 uORF ′5 STOP: 157 uORF 3′ STOP: 211 leader length: 295 |
| 3271 | AGI number: AT5G03500.3 uORF ′5 STOP: 49 uORF 3′ STOP: 106 leader length: 258 |
| 3272 | AGI number: AT5G03500.3 uORF ′5 STOP: 49 uORF 3′ STOP: 106 leader length: 258 |
| 3273 | AGI number: AT5G03540.2 uORF ′5 STOP: 259 uORF 3′ STOP: 322 leader length: 505 |
| 3274 | AGI number: AT5G03540.2 uORF ′5 STOP: 259 uORF 3′ STOP: 322 leader length: 505 |
| 3275 | AGI number: AT5G03795.1 uORF ′5 STOP: 58 uORF 3′ STOP: 112 leader length: 100 |
| 3276 | AGI number: AT5G03795.1 uORF ′5 STOP: 58 uORF 3′ STOP: 112 leader length: 100 |
| 3277 | AGI number: AT5G03990.1 uORF ′5 STOP: 119 uORF 3′ STOP: 176 leader length: 286 |
| 3278 | AGI number: AT5G03990.1 uORF ′5 STOP: 119 uORF 3′ STOP: 176 leader length: 286 |
| 3279 | AGI number: AT5G04220.1 uORF ′5 STOP: 388 uORF 3′ STOP: 448 leader length: 949 |
| 3280 | AGI number: AT5G04220.1 uORF ′5 STOP: 388 uORF 3′ STOP: 448 leader length: 949 |
| 3281 | AGI number: AT5G04320.1 uORF ′5 STOP: 72 uORF 3′ STOP: 138 leader length: 569 |
| 3282 | AGI number: AT5G04320.1 uORF ′5 STOP: 72 uORF 3′ STOP: 138 leader length: 569 |
| 3283 | AGI number: AT5G04320.1 uORF ′5 STOP: 94 uORF 3′ STOP: 163 leader length: 569 |
| 3284 | AGI number: AT5G04320.1 uORF ′5 STOP: 94 uORF 3′ STOP: 163 leader length: 569 |
| 3285 | AGI number: AT5G04320.2 uORF ′5 STOP: 73 uORF 3′ STOP: 139 leader length: 330 |
| 3286 | AGI number: AT5G04320.2 uORF ′5 STOP: 73 uORF 3′ STOP: 139 leader length: 330 |
| 3287 | AGI number: AT5G04320.2 uORF ′5 STOP: 95 uORF 3′ STOP: 164 leader length: 330 |
| 3288 | AGI number: AT5G04320.2 uORF ′5 STOP: 95 uORF 3′ STOP: 164 leader length: 330 |
| 3289 | AGI number: AT5G04480.2 uORF ′5 STOP: 32 uORF 3′ STOP: 128 leader length: 153 |
| 3290 | AGI number: AT5G04480.2 uORF ′5 STOP: 32 uORF 3′ STOP: 128 leader length: 153 |
| 3291 | AGI number: AT5G04480.2 uORF ′5 STOP: 58 uORF 3′ STOP: 115 leader length: 153 |
| 3292 | AGI number: AT5G04480.2 uORF ′5 STOP: 58 uORF 3′ STOP: 115 leader length: 153 |
| 3293 | AGI number: AT5G04920.1 uORF ′5 STOP: 159 uORF 3′ STOP: 240 leader length: 332 |
| 3294 | AGI number: AT5G04920.1 uORF ′5 STOP: 159 uORF 3′ STOP: 240 leader length: 332 |
| 3295 | AGI number: AT5G04940.1 uORF ′5 STOP: 158 uORF 3′ STOP: 236 leader length: 362 |
| 3296 | AGI number: AT5G04940.1 uORF ′5 STOP: 158 uORF 3′ STOP: 236 leader length: 362 |
| 3297 | AGI number: AT5G04940.1 uORF ′5 STOP: 187 uORF 3′ STOP: 253 leader length: 362 |
| 3298 | AGI number: AT5G04940.1 uORF ′5 STOP: 187 uORF 3′ STOP: 253 leader length: 362 |
| 3299 | AGI number: AT5G04940.2 uORF ′5 STOP: 158 uORF 3′ STOP: 236 leader length: 362 |
| 3300 | AGI number: AT5G04940.2 uORF ′5 STOP: 158 uORF 3′ STOP: 236 leader length: 362 |
| 3301 | AGI number: AT5G04940.2 uORF ′5 STOP: 187 uORF 3′ STOP: 253 leader length: 362 |
| 3302 | AGI number: AT5G04940.2 uORF ′5 STOP: 187 uORF 3′ STOP: 253 leader length: 362 |
| 3303 | AGI number: AT5G05210.2 uORF ′5 STOP: 120 uORF 3′ STOP: 189 leader length: 340 |
| 3304 | AGI number: AT5G05210.2 uORF ′5 STOP: 120 uORF 3′ STOP: 189 leader length: 340 |
| 3305 | AGI number: AT5G05210.2 uORF ′5 STOP: 70 uORF 3′ STOP: 145 leader length: 340 |
| 3306 | AGI number: AT5G05210.2 uORF ′5 STOP: 70 uORF 3′ STOP: 145 leader length: 340 |
| 3307 | AGI number: AT5G05350.1 uORF ′5 STOP: 162 uORF 3′ STOP: 306 leader length: 460 |
| 3308 | AGI number: AT5G05350.1 uORF ′5 STOP: 162 uORF 3′ STOP: 306 leader length: 460 |
| 3309 | AGI number: AT5G05350.1 uORF ′5 STOP: 459 uORF 3′ STOP: 615 leader length: 460 |
| 3310 | AGI number: AT5G05350.1 uORF ′5 STOP: 459 uORF 3′ STOP: 615 leader length: 460 |
| 3311 | AGI number: AT5G05930.2 uORF ′5 STOP: 422 uORF 3′ STOP: 482 leader length: 484 |
| 3312 | AGI number: AT5G05930.2 uORF ′5 STOP: 422 uORF 3′ STOP: 482 leader length: 484 |
| 3313 | AGI number: AT5G06100.3 uORF ′5 STOP: 29 uORF 3′ STOP: 101 leader length: 311 |
| 3314 | AGI number: AT5G06100.3 uORF ′5 STOP: 29 uORF 3′ STOP: 101 leader length: 311 |
| 3315 | AGI number: AT5G06130.1 uORF ′5 STOP: 214 uORF 3′ STOP: 301 leader length: 575 |
| 3316 | AGI number: AT5G06130.1 uORF ′5 STOP: 214 uORF 3′ STOP: 301 leader length: 575 |
| 3317 | AGI number: AT5G06130.1 uORF ′5 STOP: 207 uORF 3′ STOP: 327 leader length: 575 |
| 3318 | AGI number: AT5G06130.1 uORF ′5 STOP: 207 uORF 3′ STOP: 327 leader length: 575 |
| 3319 | AGI number: AT5G06265.3 uORF ′5 STOP: 26 uORF 3′ STOP: 197 leader length: 594 |
| 3320 | AGI number: AT5G06265.3 uORF ′5 STOP: 26 uORF 3′ STOP: 197 leader length: 594 |
| 3321 | AGI number: AT5G06265.3 uORF ′5 STOP: 96 uORF 3′ STOP: 192 leader length: 594 |
| 3322 | AGI number: AT5G06265.3 uORF ′5 STOP: 96 uORF 3′ STOP: 192 leader length: 594 |
| 3323 | AGI number: AT5G06265.3 uORF ′5 STOP: 103 uORF 3′ STOP: 166 leader length: 594 |
| 3324 | AGI number: AT5G06265.3 uORF ′5 STOP: 103 uORF 3′ STOP: 166 leader length: 594 |
| 3325 | AGI number: AT5G06420.2 uORF ′5 STOP: 539 uORF 3′ STOP: 602 leader length: 686 |
| 3326 | AGI number: AT5G06420.2 uORF ′5 STOP: 539 uORF 3′ STOP: 602 leader length: 686 |
| 3327 | AGI number: AT5G06750.1 uORF ′5 STOP: 244 uORF 3′ STOP: 361 leader length: 283 |
| 3328 | AGI number: AT5G06750.1 uORF ′5 STOP: 244 uORF 3′ STOP: 361 leader length: 283 |
| 3329 | AGI number: AT5G06839.2 uORF ′5 STOP: 161 uORF 3′ STOP: 461 leader length: 384 |
| 3330 | AGI number: AT5G06839.2 uORF ′5 STOP: 161 uORF 3′ STOP: 461 leader length: 384 |
| 3331 | AGI number: AT5G07370.4 uORF ′5 STOP: 26 uORF 3′ STOP: 209 leader length: 852 |
| 3332 | AGI number: AT5G07370.4 uORF ′5 STOP: 26 uORF 3′ STOP: 209 leader length: 852 |
| 3333 | AGI number: AT5G07370.4 uORF ′5 STOP: 115 uORF 3′ STOP: 190 leader length: 852 |
| 3334 | AGI number: AT5G07370.4 uORF ′5 STOP: 115 uORF 3′ STOP: 190 leader length: 852 |
| 3335 | AGI number: AT5G07370.4 uORF ′5 STOP: 348 uORF 3′ STOP: 417 leader length: 852 |
| 3336 | AGI number: AT5G07370.4 uORF ′5 STOP: 348 uORF 3′ STOP: 417 leader length: 852 |
| 3337 | AGI number: AT5G07790.1 uORF ′5 STOP: 37 uORF 3′ STOP: 130 leader length: 348 |
| 3338 | AGI number: AT5G07790.1 uORF ′5 STOP: 37 uORF 3′ STOP: 130 leader length: 348 |
| 3339 | AGI number: AT5G07840.1 uORF ′5 STOP: 256 uORF 3′ STOP: 394 leader length: 656 |
| 3340 | AGI number: AT5G07840.1 uORF ′5 STOP: 256 uORF 3′ STOP: 394 leader length: 656 |
| 3341 | AGI number: AT5G07840.1 uORF ′5 STOP: 284 uORF 3′ STOP: 407 leader length: 656 |
| 3342 | AGI number: AT5G07840.1 uORF ′5 STOP: 284 uORF 3′ STOP: 407 leader length: 656 |
| 3343 | AGI number: AT5G07842.1 uORF ′5 STOP: 318 uORF 3′ STOP: 456 leader length: 351 |
| 3344 | AGI number: AT5G07842.1 uORF ′5 STOP: 318 uORF 3′ STOP: 456 leader length: 351 |
| 3345 | AGI number: AT5G07890.2 uORF ′5 STOP: 229 uORF 3′ STOP: 310 leader length: 486 |
| 3346 | AGI number: AT5G07890.2 uORF ′5 STOP: 229 uORF 3′ STOP: 310 leader length: 486 |
| 3347 | AGI number: AT5G07920.1 uORF ′5 STOP: 282 uORF 3′ STOP: 354 leader length: 437 |
| 3348 | AGI number: AT5G07920.1 uORF ′5 STOP: 282 uORF 3′ STOP: 354 leader length: 437 |
| 3349 | AGI number: AT5G08100.2 uORF ′5 STOP: 122 uORF 3′ STOP: 293 leader length: 489 |
| 3350 | AGI number: AT5G08100.2 uORF ′5 STOP: 122 uORF 3′ STOP: 293 leader length: 489 |
| 3351 | AGI number: AT5G08130.4 uORF ′5 STOP: 44 uORF 3′ STOP: 206 leader length: 499 |
| 3352 | AGI number: AT5G08130.4 uORF ′5 STOP: 44 uORF 3′ STOP: 206 leader length: 499 |
| 3353 | AGI number: AT5G08130.5 uORF ′5 STOP: 44 uORF 3′ STOP: 206 leader length: 499 |
| 3354 | AGI number: AT5G08130.5 uORF ′5 STOP: 44 uORF 3′ STOP: 206 leader length: 499 |
| 3355 | AGI number: AT5G08130.5 uORF ′5 STOP: 270 uORF 3′ STOP: 381 leader length: 499 |
| 3356 | AGI number: AT5G08130.5 uORF ′5 STOP: 270 uORF 3′ STOP: 381 leader length: 499 |
| 3357 | AGI number: AT5G08185.3 uORF ′5 STOP: 31 uORF 3′ STOP: 121 leader length: 89 |
| 3358 | AGI number: AT5G08185.3 uORF ′5 STOP: 31 uORF 3′ STOP: 121 leader length: 89 |
| 3359 | AGI number: AT5G08560.1 uORF ′5 STOP: 164 uORF 3′ STOP: 293 leader length: 299 |
| 3360 | AGI number: AT5G08560.1 uORF ′5 STOP: 164 uORF 3′ STOP: 293 leader length: 299 |
| 3361 | AGI number: AT5G08560.1 uORF ′5 STOP: 204 uORF 3′ STOP: 288 leader length: 299 |
| 3362 | AGI number: AT5G08560.1 uORF ′5 STOP: 204 uORF 3′ STOP: 288 leader length: 299 |
| 3363 | AGI number: AT5G08560.1 uORF ′5 STOP: 268 uORF 3′ STOP: 334 leader length: 299 |
| 3364 | AGI number: AT5G08560.1 uORF ′5 STOP: 268 uORF 3′ STOP: 334 leader length: 299 |
| 3365 | AGI number: AT5G09350.1 uORF ′5 STOP: 120 uORF 3′ STOP: 189 leader length: 536 |
| 3366 | AGI number: AT5G09350.1 uORF ′5 STOP: 120 uORF 3′ STOP: 189 leader length: 536 |
| 3367 | AGI number: AT5G09460.1 uORF ′5 STOP: 152 uORF 3′ STOP: 284 leader length: 866 |
| 3368 | AGI number: AT5G09460.1 uORF ′5 STOP: 152 uORF 3′ STOP: 284 leader length: 866 |
| 3369 | AGI number: AT5G09460.1 uORF ′5 STOP: 241 uORF 3′ STOP: 412 leader length: 866 |
| 3370 | AGI number: AT5G09460.1 uORF ′5 STOP: 241 uORF 3′ STOP: 412 leader length: 866 |
| 3371 | AGI number: AT5G09460.1 uORF ′5 STOP: 607 uORF 3′ STOP: 682 leader length: 866 |
| 3372 | AGI number: AT5G09460.1 uORF ′5 STOP: 607 uORF 3′ STOP: 682 leader length: 866 |
| 3373 | AGI number: AT5G09461.1 uORF ′5 STOP: 241 uORF 3′ STOP: 412 leader length: 521 |
| 3374 | AGI number: AT5G09461.1 uORF ′5 STOP: 241 uORF 3′ STOP: 412 leader length: 521 |
| 3375 | AGI number: AT5G09462.1 uORF ′5 STOP: 152 uORF 3′ STOP: 284 leader length: 357 |
| 3376 | AGI number: AT5G09462.1 uORF ′5 STOP: 152 uORF 3′ STOP: 284 leader length: 357 |
| 3377 | AGI number: AT5G09600.2 uORF ′5 STOP: 66 uORF 3′ STOP: 159 leader length: 255 |
| 3378 | AGI number: AT5G09600.2 uORF ′5 STOP: 66 uORF 3′ STOP: 159 leader length: 255 |
| 3379 | AGI number: AT5G09630.1 uORF ′5 STOP: 25 uORF 3′ STOP: 106 leader length: 209 |
| 3380 | AGI number: AT5G09630.1 uORF ′5 STOP: 25 uORF 3′ STOP: 106 leader length: 209 |
| 3381 | AGI number: AT5G09670.1 uORF ′5 STOP: 219 uORF 3′ STOP: 279 leader length: 1167 |
| 3382 | AGI number: AT5G09670.1 uORF ′5 STOP: 219 uORF 3′ STOP: 279 leader length: 1167 |
| 3383 | AGI number: AT5G09670.1 uORF ′5 STOP: 226 uORF 3′ STOP: 289 leader length: 1167 |
| 3384 | AGI number: AT5G09670.1 uORF ′5 STOP: 226 uORF 3′ STOP: 289 leader length: 1167 |
| 3385 | AGI number: AT5G09680.2 uORF ′5 STOP: 33 uORF 3′ STOP: 93 leader length: 416 |
| 3386 | AGI number: AT5G09680.2 uORF ′5 STOP: 33 uORF 3′ STOP: 93 leader length: 416 |
| 3387 | AGI number: AT5G09850.1 uORF ′5 STOP: 264 uORF 3′ STOP: 372 leader length: 668 |
| 3388 | AGI number: AT5G09850.1 uORF ′5 STOP: 264 uORF 3′ STOP: 372 leader length: 668 |
| 3389 | AGI number: AT5G09850.1 uORF ′5 STOP: 527 uORF 3′ STOP: 584 leader length: 668 |
| 3390 | AGI number: AT5G09850.1 uORF ′5 STOP: 527 uORF 3′ STOP: 584 leader length: 668 |
| 3391 | AGI number: AT5G10030.1 uORF ′5 STOP: 26 uORF 3′ STOP: 146 leader length: 255 |
| 3392 | AGI number: AT5G10030.1 uORF ′5 STOP: 26 uORF 3′ STOP: 146 leader length: 255 |
| 3393 | AGI number: AT5G10030.1 uORF ′5 STOP: 51 uORF 3′ STOP: 165 leader length: 255 |
| 3394 | AGI number: AT5G10030.1 uORF ′5 STOP: 51 uORF 3′ STOP: 165 leader length: 255 |
| 3395 | AGI number: AT5G10510.2 uORF ′5 STOP: 438 uORF 3′ STOP: 531 leader length: 462 |
| 3396 | AGI number: AT5G10510.2 uORF ′5 STOP: 438 uORF 3′ STOP: 531 leader length: 462 |
| 3397 | AGI number: AT5G11150.1 uORF ′5 STOP: 64 uORF 3′ STOP: 154 leader length: 267 |
| 3398 | AGI number: AT5G11150.1 uORF ′5 STOP: 64 uORF 3′ STOP: 154 leader length: 267 |
| 3399 | AGI number: AT5G11730.1 uORF ′5 STOP: 348 uORF 3′ STOP: 432 leader length: 652 |
| 3400 | AGI number: AT5G11730.1 uORF ′5 STOP: 348 uORF 3′ STOP: 432 leader length: 652 |
| 3401 | AGI number: AT5G11860.3 uORF ′5 STOP: 75 uORF 3′ STOP: 132 leader length: 197 |
| 3402 | AGI number: AT5G11860.3 uORF ′5 STOP: 75 uORF 3′ STOP: 132 leader length: 197 |
| 3403 | AGI number: AT5G12440.3 uORF ′5 STOP: 13 uORF 3′ STOP: 64 leader length: 172 |
| 3404 | AGI number: AT5G12440.3 uORF ′5 STOP: 13 uORF 3′ STOP: 64 leader length: 172 |
| 3405 | AGI number: AT5G12480.1 uORF ′5 STOP: 12 uORF 3′ STOP: 102 leader length: 206 |
| 3406 | AGI number: AT5G12480.1 uORF ′5 STOP: 12 uORF 3′ STOP: 102 leader length: 206 |
| 3407 | AGI number: AT5G12840.2 uORF ′5 STOP: 176 uORF 3′ STOP: 230 leader length: 327 |
| 3408 | AGI number: AT5G12840.2 uORF ′5 STOP: 176 uORF 3′ STOP: 230 leader length: 327 |
| 3409 | AGI number: AT5G13290.1 uORF ′5 STOP: 262 uORF 3′ STOP: 430 leader length: 679 |
| 3410 | AGI number: AT5G13290.1 uORF ′5 STOP: 262 uORF 3′ STOP: 430 leader length: 679 |
| 3411 | AGI number: AT5G13660.2 uORF ′5 STOP: 183 uORF 3′ STOP: 282 leader length: 344 |
| 3412 | AGI number: AT5G13660.2 uORF ′5 STOP: 183 uORF 3′ STOP: 282 leader length: 344 |
| 3413 | AGI number: AT5G13660.2 uORF ′5 STOP: 203 uORF 3′ STOP: 287 leader length: 344 |
| 3414 | AGI number: AT5G13660.2 uORF ′5 STOP: 203 uORF 3′ STOP: 287 leader length: 344 |
| 3415 | AGI number: AT5G13840.1 uORF ′5 STOP: 137 uORF 3′ STOP: 320 leader length: 285 |
| 3416 | AGI number: AT5G13840.1 uORF ′5 STOP: 137 uORF 3′ STOP: 320 leader length: 285 |
| 3417 | AGI number: AT5G14310.1 uORF ′5 STOP: 56 uORF 3′ STOP: 188 leader length: 274 |
| 3418 | AGI number: AT5G14310.1 uORF ′5 STOP: 56 uORF 3′ STOP: 188 leader length: 274 |
| 3419 | AGI number: AT5G14310.1 uORF ′5 STOP: 120 uORF 3′ STOP: 183 leader length: 274 |
| 3420 | AGI number: AT5G14310.1 uORF ′5 STOP: 120 uORF 3′ STOP: 183 leader length: 274 |
| 3421 | AGI number: AT5G14720.1 uORF ′5 STOP: 83 uORF 3′ STOP: 137 leader length: 466 |
| 3422 | AGI number: AT5G14720.1 uORF ′5 STOP: 83 uORF 3′ STOP: 137 leader length: 466 |
| 3423 | AGI number: AT5G14740.1 uORF ′5 STOP: 98 uORF 3′ STOP: 284 leader length: 285 |
| 3424 | AGI number: AT5G14740.1 uORF ′5 STOP: 98 uORF 3′ STOP: 284 leader length: 285 |
| 3425 | AGI number: AT5G14740.3 uORF ′5 STOP: 4 uORF 3′ STOP: 94 leader length: 285 |
| 3426 | AGI number: AT5G14740.3 uORF ′5 STOP: 4 uORF 3′ STOP: 94 leader length: 285 |
| 3427 | AGI number: AT5G14740.5 uORF ′5 STOP: 4 uORF 3′ STOP: 94 leader length: 285 |
| 3428 | AGI number: AT5G14740.5 uORF ′5 STOP: 4 uORF 3′ STOP: 94 leader length: 285 |
| 3429 | AGI number: AT5G14740.5 uORF ′5 STOP: 38 uORF 3′ STOP: 101 leader length: 285 |
| 3430 | AGI number: AT5G14740.5 uORF ′5 STOP: 38 uORF 3′ STOP: 101 leader length: 285 |
| 3431 | AGI number: AT5G14740.5 uORF ′5 STOP: 98 uORF 3′ STOP: 284 leader length: 285 |
| 3432 | AGI number: AT5G14740.5 uORF ′5 STOP: 98 uORF 3′ STOP: 284 leader length: 285 |
| 3433 | AGI number: AT5G15020.2 uORF ′5 STOP: 141 uORF 3′ STOP: 222 leader length: 322 |
| 3434 | AGI number: AT5G15020.2 uORF ′5 STOP: 141 uORF 3′ STOP: 222 leader length: 322 |
| 3435 | AGI number: AT5G15260.1 uORF ′5 STOP: 118 uORF 3′ STOP: 235 leader length: 473 |
| 3436 | AGI number: AT5G15260.1 uORF ′5 STOP: 118 uORF 3′ STOP: 235 leader length: 473 |
| 3437 | AGI number: AT5G15260.1 uORF ′5 STOP: 288 uORF 3′ STOP: 348 leader length: 473 |
| 3438 | AGI number: AT5G15260.1 uORF ′5 STOP: 288 uORF 3′ STOP: 348 leader length: 473 |
| 3439 | AGI number: AT5G15260.1 uORF ′5 STOP: 332 uORF 3′ STOP: 386 leader length: 473 |
| 3440 | AGI number: AT5G15260.1 uORF ′5 STOP: 332 uORF 3′ STOP: 386 leader length: 473 |
| 3441 | AGI number: AT5G15320.2 uORF ′5 STOP: 103 uORF 3′ STOP: 247 leader length: 112 |
| 3442 | AGI number: AT5G15320.2 uORF ′5 STOP: 103 uORF 3′ STOP: 247 leader length: 112 |
| 3443 | AGI number: AT5G15400.1 uORF ′5 STOP: 16 uORF 3′ STOP: 124 leader length: 233 |
| 3444 | AGI number: AT5G15400.1 uORF ′5 STOP: 16 uORF 3′ STOP: 124 leader length: 233 |
| 3445 | AGI number: AT5G15580.1 uORF ′5 STOP: 66 uORF 3′ STOP: 126 leader length: 562 |
| 3446 | AGI number: AT5G15580.1 uORF ′5 STOP: 66 uORF 3′ STOP: 126 leader length: 562 |
| 3447 | AGI number: AT5G15790.1 uORF ′5 STOP: 149 uORF 3′ STOP: 236 leader length: 366 |
| 3448 | AGI number: AT5G15790.1 uORF ′5 STOP: 149 uORF 3′ STOP: 236 leader length: 366 |
| 3449 | AGI number: AT5G15948.1 uORF ′5 STOP: 196 uORF 3′ STOP: 361 leader length: 197 |
| 3450 | AGI number: AT5G15948.1 uORF ′5 STOP: 196 uORF 3′ STOP: 361 leader length: 197 |
| 3451 | AGI number: AT5G15950.1 uORF ′5 STOP: 153 uORF 3′ STOP: 351 leader length: 468 |
| 3452 | AGI number: AT5G15950.1 uORF ′5 STOP: 153 uORF 3′ STOP: 351 leader length: 468 |
| 3453 | AGI number: AT5G15950.1 uORF ′5 STOP: 193 uORF 3′ STOP: 358 leader length: 468 |
| 3454 | AGI number: AT5G15950.1 uORF ′5 STOP: 193 uORF 3′ STOP: 358 leader length: 468 |
| 3455 | AGI number: AT5G15950.1 uORF ′5 STOP: 272 uORF 3′ STOP: 338 leader length: 468 |
| 3456 | AGI number: AT5G15950.1 uORF ′5 STOP: 272 uORF 3′ STOP: 338 leader length: 468 |
| 3457 | AGI number: AT5G15950.2 uORF ′5 STOP: 247 uORF 3′ STOP: 433 leader length: 550 |
| 3458 | AGI number: AT5G15950.2 uORF ′5 STOP: 247 uORF 3′ STOP: 433 leader length: 550 |
| 3459 | AGI number: AT5G15950.2 uORF ′5 STOP: 275 uORF 3′ STOP: 440 leader length: 550 |
| 3460 | AGI number: AT5G15950.2 uORF ′5 STOP: 275 uORF 3′ STOP: 440 leader length: 550 |
| 3461 | AGI number: AT5G15950.2 uORF ′5 STOP: 354 uORF 3′ STOP: 420 leader length: 550 |
| 3462 | AGI number: AT5G15950.2 uORF ′5 STOP: 354 uORF 3′ STOP: 420 leader length: 550 |
| 3463 | AGI number: AT5G16140.2 uORF ′5 STOP: 40 uORF 3′ STOP: 118 leader length: 250 |
| 3464 | AGI number: AT5G16140.2 uORF ′5 STOP: 40 uORF 3′ STOP: 118 leader length: 250 |
| 3465 | AGI number: AT5G16140.2 uORF ′5 STOP: 108 uORF 3′ STOP: 159 leader length: 250 |
| 3466 | AGI number: AT5G16140.2 uORF ′5 STOP: 108 uORF 3′ STOP: 159 leader length: 250 |
| 3467 | AGI number: AT5G16280.2 uORF ′5 STOP: 107 uORF 3′ STOP: 245 leader length: 340 |
| 3468 | AGI number: AT5G16280.2 uORF ′5 STOP: 107 uORF 3′ STOP: 245 leader length: 340 |
| 3469 | AGI number: AT5G16510.2 uORF ′5 STOP: 70 uORF 3′ STOP: 124 leader length: 239 |
| 3470 | AGI number: AT5G16510.2 uORF ′5 STOP: 70 uORF 3′ STOP: 124 leader length: 239 |
| 3471 | AGI number: AT5G16610.2 uORF ′5 STOP: 69 uORF 3′ STOP: 135 leader length: 264 |
| 3472 | AGI number: AT5G16610.2 uORF ′5 STOP: 69 uORF 3′ STOP: 135 leader length: 264 |
| 3473 | AGI number: AT5G17460.1 uORF ′5 STOP: 334 uORF 3′ STOP: 442 leader length: 928 |
| 3474 | AGI number: AT5G17460.1 uORF ′5 STOP: 334 uORF 3′ STOP: 442 leader length: 928 |
| 3475 | AGI number: AT5G17460.1 uORF ′5 STOP: 138 uORF 3′ STOP: 393 leader length: 928 |
| 3476 | AGI number: AT5G17460.1 uORF ′5 STOP: 138 uORF 3′ STOP: 393 leader length: 928 |
| 3477 | AGI number: AT5G17460.1 uORF ′5 STOP: 311 uORF 3′ STOP: 458 leader length: 928 |
| 3478 | AGI number: AT5G17460.1 uORF ′5 STOP: 311 uORF 3′ STOP: 458 leader length: 928 |
| 3479 | AGI number: AT5G18590.2 uORF ′5 STOP: 160 uORF 3′ STOP: 283 leader length: 412 |
| 3480 | AGI number: AT5G18590.2 uORF ′5 STOP: 160 uORF 3′ STOP: 283 leader length: 412 |
| 3481 | AGI number: AT5G18690.1 uORF ′5 STOP: 52 uORF 3′ STOP: 424 leader length: 80 |
| 3482 | AGI number: AT5G18690.1 uORF ′5 STOP: 52 uORF 3′ STOP: 424 leader length: 80 |
| 3483 | AGI number: AT5G18860.1 uORF ′5 STOP: 131 uORF 3′ STOP: 245 leader length: 347 |
| 3484 | AGI number: AT5G18860.1 uORF ′5 STOP: 131 uORF 3′ STOP: 245 leader length: 347 |
| 3485 | AGI number: AT5G18860.1 uORF ′5 STOP: 154 uORF 3′ STOP: 250 leader length: 347 |
| 3486 | AGI number: AT5G18860.1 uORF ′5 STOP: 154 uORF 3′ STOP: 250 leader length: 347 |
| 3487 | AGI number: AT5G19420.2 uORF ′5 STOP: 70 uORF 3′ STOP: 154 leader length: 261 |
| 3488 | AGI number: AT5G19420.2 uORF ′5 STOP: 70 uORF 3′ STOP: 154 leader length: 261 |
| 3489 | AGI number: AT5G19430.2 uORF ′5 STOP: 122 uORF 3′ STOP: 413 leader length: 510 |
| 3490 | AGI number: AT5G19430.2 uORF ′5 STOP: 122 uORF 3′ STOP: 413 leader length: 510 |
| 3491 | AGI number: AT5G19670.1 uORF ′5 STOP: 127 uORF 3′ STOP: 217 leader length: 306 |
| 3492 | AGI number: AT5G19670.1 uORF ′5 STOP: 127 uORF 3′ STOP: 217 leader length: 306 |
| 3493 | AGI number: AT5G20250.1 uORF ′5 STOP: 20 uORF 3′ STOP: 305 leader length: 439 |
| 3494 | AGI number: AT5G20250.1 uORF ′5 STOP: 20 uORF 3′ STOP: 305 leader length: 439 |
| 3495 | AGI number: AT5G20450.3 uORF ′5 STOP: 135 uORF 3′ STOP: 249 leader length: 497 |
| 3496 | AGI number: AT5G20450.3 uORF ′5 STOP: 135 uORF 3′ STOP: 249 leader length: 497 |
| 3497 | AGI number: AT5G20680.1 uORF ′5 STOP: 144 uORF 3′ STOP: 207 leader length: 415 |
| 3498 | AGI number: AT5G20680.1 uORF ′5 STOP: 144 uORF 3′ STOP: 207 leader length: 415 |
| 3499 | AGI number: AT5G20680.1 uORF ′5 STOP: 163 uORF 3′ STOP: 229 leader length: 415 |
| 3500 | AGI number: AT5G20680.1 uORF ′5 STOP: 163 uORF 3′ STOP: 229 leader length: 415 |
| 3501 | AGI number: AT5G20930.1 uORF ′5 STOP: 156 uORF 3′ STOP: 207 leader length: 305 |
| 3502 | AGI number: AT5G20930.1 uORF ′5 STOP: 156 uORF 3′ STOP: 207 leader length: 305 |
| 3503 | AGI number: AT5G21910.1 uORF ′5 STOP: 61 uORF 3′ STOP: 352 leader length: 130 |
| 3504 | AGI number: AT5G21910.1 uORF ′5 STOP: 61 uORF 3′ STOP: 352 leader length: 130 |
| 3505 | AGI number: AT5G22130.2 uORF ′5 STOP: 106 uORF 3′ STOP: 175 leader length: 221 |
| 3506 | AGI number: AT5G22130.2 uORF ′5 STOP: 106 uORF 3′ STOP: 175 leader length: 221 |
| 3507 | AGI number: AT5G22940.1 uORF ′5 STOP: 37 uORF 3′ STOP: 187 leader length: 259 |
| 3508 | AGI number: AT5G22940.1 uORF ′5 STOP: 37 uORF 3′ STOP: 187 leader length: 259 |
| 3509 | AGI number: AT5G22940.1 uORF ′5 STOP: 120 uORF 3′ STOP: 171 leader length: 259 |
| 3510 | AGI number: AT5G22940.1 uORF ′5 STOP: 120 uORF 3′ STOP: 171 leader length: 259 |
| 3511 | AGI number: AT5G23450.2 uORF ′5 STOP: 186 uORF 3′ STOP: 306 leader length: 456 |
| 3512 | AGI number: AT5G23450.2 uORF ′5 STOP: 186 uORF 3′ STOP: 306 leader length: 456 |
| 3513 | AGI number: AT5G23450.3 uORF ′5 STOP: 186 uORF 3′ STOP: 306 leader length: 456 |
| 3514 | AGI number: AT5G23450.3 uORF ′5 STOP: 186 uORF 3′ STOP: 306 leader length: 456 |
| 3515 | AGI number: AT5G23610.2 uORF ′5 STOP: 179 uORF 3′ STOP: 248 leader length: 304 |
| 3516 | AGI number: AT5G23610.2 uORF ′5 STOP: 179 uORF 3′ STOP: 248 leader length: 304 |
| 3517 | AGI number: AT5G24105.1 uORF ′5 STOP: 149 uORF 3′ STOP: 383 leader length: 173 |
| 3518 | AGI number: AT5G24105.1 uORF ′5 STOP: 149 uORF 3′ STOP: 383 leader length: 173 |
| 3519 | AGI number: AT5G24360.3 uORF ′5 STOP: 205 uORF 3′ STOP: 262 leader length: 275 |
| 3520 | AGI number: AT5G24360.3 uORF ′5 STOP: 205 uORF 3′ STOP: 262 leader length: 275 |
| 3521 | AGI number: AT5G24760.2 uORF ′5 STOP: 36 uORF 3′ STOP: 99 leader length: 210 |
| 3522 | AGI number: AT5G24760.2 uORF ′5 STOP: 36 uORF 3′ STOP: 99 leader length: 210 |
| 3523 | AGI number: AT5G24970.2 uORF ′5 STOP: 111 uORF 3′ STOP: 177 leader length: 186 |
| 3524 | AGI number: AT5G24970.2 uORF ′5 STOP: 111 uORF 3′ STOP: 177 leader length: 186 |
| 3525 | AGI number: AT5G25110.1 uORF ′5 STOP: 83 uORF 3′ STOP: 134 leader length: 116 |
| 3526 | AGI number: AT5G25110.1 uORF ′5 STOP: 83 uORF 3′ STOP: 134 leader length: 116 |
| 3527 | AGI number: AT5G25560.3 uORF ′5 STOP: 371 uORF 3′ STOP: 422 leader length: 551 |
| 3528 | AGI number: AT5G25560.3 uORF ′5 STOP: 371 uORF 3′ STOP: 422 leader length: 551 |
| 3529 | AGI number: AT5G25560.4 uORF ′5 STOP: 476 uORF 3′ STOP: 545 leader length: 1505 |
| 3530 | AGI number: AT5G25560.4 uORF ′5 STOP: 476 uORF 3′ STOP: 545 leader length: 1505 |
| 3531 | AGI number: AT5G25620.1 uORF ′5 STOP: 200 uORF 3′ STOP: 350 leader length: 442 |
| 3532 | AGI number: AT5G25620.1 uORF ′5 STOP: 200 uORF 3′ STOP: 350 leader length: 442 |
| 3533 | AGI number: AT5G25620.2 uORF ′5 STOP: 292 uORF 3′ STOP: 442 leader length: 558 |
| 3534 | AGI number: AT5G25620.2 uORF ′5 STOP: 292 uORF 3′ STOP: 442 leader length: 558 |
| 3535 | AGI number: AT5G25760.2 uORF ′5 STOP: 56 uORF 3′ STOP: 164 leader length: 281 |
| 3536 | AGI number: AT5G25760.2 uORF ′5 STOP: 56 uORF 3′ STOP: 164 leader length: 281 |
| 3537 | AGI number: AT5G26622.1 uORF ′5 STOP: 305 uORF 3′ STOP: 368 leader length: 545 |
| 3538 | AGI number: AT5G26622.1 uORF ′5 STOP: 305 uORF 3′ STOP: 368 leader length: 545 |
| 3539 | AGI number: AT5G26740.3 uORF ′5 STOP: 132 uORF 3′ STOP: 201 leader length: 419 |
| 3540 | AGI number: AT5G26740.3 uORF ′5 STOP: 132 uORF 3′ STOP: 201 leader length: 419 |
| 3541 | AGI number: AT5G26910.1 uORF ′5 STOP: 239 uORF 3′ STOP: 335 leader length: 602 |
| 3542 | AGI number: AT5G26910.1 uORF ′5 STOP: 239 uORF 3′ STOP: 335 leader length: 602 |
| 3543 | AGI number: AT5G26910.3 uORF ′5 STOP: 173 uORF 3′ STOP: 269 leader length: 536 |
| 3544 | AGI number: AT5G26910.3 uORF ′5 STOP: 173 uORF 3′ STOP: 269 leader length: 536 |
| 3545 | AGI number: AT5G26940.4 uORF ′5 STOP: 50 uORF 3′ STOP: 158 leader length: 203 |
| 3546 | AGI number: AT5G26940.4 uORF ′5 STOP: 50 uORF 3′ STOP: 158 leader length: 203 |
| 3547 | AGI number: AT5G27950.1 uORF ′5 STOP: 40 uORF 3′ STOP: 184 leader length: 723 |
| 3548 | AGI number: AT5G27950.1 uORF ′5 STOP: 40 uORF 3′ STOP: 184 leader length: 723 |
| 3549 | AGI number: AT5G27950.1 uORF ′5 STOP: 181 uORF 3′ STOP: 238 leader length: 723 |
| 3550 | AGI number: AT5G27950.1 uORF ′5 STOP: 181 uORF 3′ STOP: 238 leader length: 723 |
| 3551 | AGI number: AT5G28850.1 uORF ′5 STOP: 766 uORF 3′ STOP: 859 leader length: 893 |
| 3552 | AGI number: AT5G28850.1 uORF ′5 STOP: 766 uORF 3′ STOP: 859 leader length: 893 |
| 3553 | AGI number: AT5G28850.1 uORF ′5 STOP: 158 uORF 3′ STOP: 875 leader length: 893 |
| 3554 | AGI number: AT5G28850.1 uORF ′5 STOP: 158 uORF 3′ STOP: 875 leader length: 893 |
| 3555 | AGI number: AT5G33210.2 uORF ′5 STOP: 8 uORF 3′ STOP: 104 leader length: 140 |
| 3556 | AGI number: AT5G33210.2 uORF ′5 STOP: 8 uORF 3′ STOP: 104 leader length: 140 |
| 3557 | AGI number: AT5G35980.1 uORF ′5 STOP: 368 uORF 3′ STOP: 425 leader length: 567 |
| 3558 | AGI number: AT5G35980.1 uORF ′5 STOP: 368 uORF 3′ STOP: 425 leader length: 567 |
| 3559 | AGI number: AT5G35980.1 uORF ′5 STOP: 382 uORF 3′ STOP: 442 leader length: 567 |
| 3560 | AGI number: AT5G35980.1 uORF ′5 STOP: 382 uORF 3′ STOP: 442 leader length: 567 |
| 3561 | AGI number: AT5G35980.2 uORF ′5 STOP: 368 uORF 3′ STOP: 425 leader length: 567 |
| 3562 | AGI number: AT5G35980.2 uORF ′5 STOP: 368 uORF 3′ STOP: 425 leader length: 567 |
| 3563 | AGI number: AT5G35980.2 uORF ′5 STOP: 382 uORF 3′ STOP: 442 leader length: 567 |
| 3564 | AGI number: AT5G35980.2 uORF ′5 STOP: 382 uORF 3′ STOP: 442 leader length: 567 |
| 3565 | AGI number: AT5G35995.2 uORF ′5 STOP: 81 uORF 3′ STOP: 198 leader length: 398 |
| 3566 | AGI number: AT5G35995.2 uORF ′5 STOP: 81 uORF 3′ STOP: 198 leader length: 398 |
| 3567 | AGI number: AT5G37370.4 uORF ′5 STOP: 85 uORF 3′ STOP: 163 leader length: 327 |
| 3568 | AGI number: AT5G37370.4 uORF ′5 STOP: 85 uORF 3′ STOP: 163 leader length: 327 |
| 3569 | AGI number: AT5G37380.2 uORF ′5 STOP: 26 uORF 3′ STOP: 104 leader length: 219 |
| 3570 | AGI number: AT5G37380.2 uORF ′5 STOP: 26 uORF 3′ STOP: 104 leader length: 219 |
| 3571 | AGI number: AT5G37380.3 uORF ′5 STOP: 20 uORF 3′ STOP: 122 leader length: 227 |
| 3572 | AGI number: AT5G37380.3 uORF ′5 STOP: 20 uORF 3′ STOP: 122 leader length: 227 |
| 3573 | AGI number: AT5G38590.2 uORF ′5 STOP: 93 uORF 3′ STOP: 198 leader length: 270 |
| 3574 | AGI number: AT5G38590.2 uORF ′5 STOP: 93 uORF 3′ STOP: 198 leader length: 270 |
| 3575 | AGI number: AT5G38970.2 uORF ′5 STOP: 137 uORF 3′ STOP: 278 leader length: 411 |
| 3576 | AGI number: AT5G38970.2 uORF ′5 STOP: 137 uORF 3′ STOP: 278 leader length: 411 |
| 3577 | AGI number: AT5G39360.1 uORF ′5 STOP: 92 uORF 3′ STOP: 173 leader length: 251 |
| 3578 | AGI number: AT5G39360.1 uORF ′5 STOP: 92 uORF 3′ STOP: 173 leader length: 251 |
| 3579 | AGI number: AT5G39450.1 uORF ′5 STOP: 117 uORF 3′ STOP: 222 leader length: 328 |
| 3580 | AGI number: AT5G39450.1 uORF ′5 STOP: 117 uORF 3′ STOP: 222 leader length: 328 |
| 3581 | AGI number: AT5G39450.1 uORF ′5 STOP: 163 uORF 3′ STOP: 229 leader length: 328 |
| 3582 | AGI number: AT5G39450.1 uORF ′5 STOP: 163 uORF 3′ STOP: 229 leader length: 328 |
| 3583 | AGI number: AT5G40370.2 uORF ′5 STOP: 38 uORF 3′ STOP: 167 leader length: 298 |
| 3584 | AGI number: AT5G40370.2 uORF ′5 STOP: 38 uORF 3′ STOP: 167 leader length: 298 |
| 3585 | AGI number: AT5G40760.1 uORF ′5 STOP: 47 uORF 3′ STOP: 104 leader length: 193 |
| 3586 | AGI number: AT5G40760.1 uORF ′5 STOP: 47 uORF 3′ STOP: 104 leader length: 193 |
| 3587 | AGI number: AT5G40810.2 uORF ′5 STOP: 111 uORF 3′ STOP: 204 leader length: 609 |
| 3588 | AGI number: AT5G40810.2 uORF ′5 STOP: 111 uORF 3′ STOP: 204 leader length: 609 |
| 3589 | AGI number: AT5G41110.1 uORF ′5 STOP: 362 uORF 3′ STOP: 434 leader length: 604 |
| 3590 | AGI number: AT5G41110.1 uORF ′5 STOP: 362 uORF 3′ STOP: 434 leader length: 604 |
| 3591 | AGI number: AT5G41410.1 uORF ′5 STOP: 164 uORF 3′ STOP: 305 leader length: 380 |
| 3592 | AGI number: AT5G41410.1 uORF ′5 STOP: 164 uORF 3′ STOP: 305 leader length: 380 |
| 3593 | AGI number: AT5G41610.1 uORF ′5 STOP: 123 uORF 3′ STOP: 261 leader length: 220 |
| 3594 | AGI number: AT5G41610.1 uORF ′5 STOP: 123 uORF 3′ STOP: 261 leader length: 220 |
| 3595 | AGI number: AT5G42560.3 uORF ′5 STOP: 192 uORF 3′ STOP: 255 leader length: 320 |
| 3596 | AGI number: AT5G42560.3 uORF ′5 STOP: 192 uORF 3′ STOP: 255 leader length: 320 |
| 3597 | AGI number: AT5G43320.1 uORF ′5 STOP: 197 uORF 3′ STOP: 365 leader length: 586 |
| 3598 | AGI number: AT5G43320.1 uORF ′5 STOP: 197 uORF 3′ STOP: 365 leader length: 586 |
| 3599 | AGI number: AT5G43320.1 uORF ′5 STOP: 285 uORF 3′ STOP: 348 leader length: 586 |
| 3600 | AGI number: AT5G43320.1 uORF ′5 STOP: 285 uORF 3′ STOP: 348 leader length: 586 |
| 3601 | AGI number: AT5G43810.2 uORF ′5 STOP: 151 uORF 3′ STOP: 259 leader length: 561 |
| 3602 | AGI number: AT5G43810.2 uORF ′5 STOP: 151 uORF 3′ STOP: 259 leader length: 561 |
| 3603 | AGI number: AT5G44040.1 uORF ′5 STOP: 83 uORF 3′ STOP: 155 leader length: 232 |
| 3604 | AGI number: AT5G44040.1 uORF ′5 STOP: 83 uORF 3′ STOP: 155 leader length: 232 |
| 3605 | AGI number: AT5G44568.1 uORF ′5 STOP: 23 uORF 3′ STOP: 269 leader length: 56 |
| 3606 | AGI number: AT5G44568.1 uORF ′5 STOP: 23 uORF 3′ STOP: 269 leader length: 56 |
| 3607 | AGI number: AT5G44800.1 uORF ′5 STOP: 45 uORF 3′ STOP: 141 leader length: 383 |
| 3608 | AGI number: AT5G44800.1 uORF ′5 STOP: 45 uORF 3′ STOP: 141 leader length: 383 |
| 3609 | AGI number: AT5G44980.1 uORF ′5 STOP: 18 uORF 3′ STOP: 162 leader length: 78 |
| 3610 | AGI number: AT5G44980.1 uORF ′5 STOP: 18 uORF 3′ STOP: 162 leader length: 78 |
| 3611 | AGI number: AT5G45100.2 uORF ′5 STOP: 103 uORF 3′ STOP: 244 leader length: 352 |
| 3612 | AGI number: AT5G45100.2 uORF ′5 STOP: 103 uORF 3′ STOP: 244 leader length: 352 |
| 3613 | AGI number: AT5G45100.2 uORF ′5 STOP: 86 uORF 3′ STOP: 209 leader length: 352 |
| 3614 | AGI number: AT5G45100.2 uORF ′5 STOP: 86 uORF 3′ STOP: 209 leader length: 352 |
| 3615 | AGI number: AT5G45430.1 uORF ′5 STOP: 196 uORF 3′ STOP: 328 leader length: 869 |
| 3616 | AGI number: AT5G45430.1 uORF ′5 STOP: 196 uORF 3′ STOP: 328 leader length: 869 |
| 3617 | AGI number: AT5G45430.2 uORF ′5 STOP: 15 uORF 3′ STOP: 369 leader length: 921 |
| 3618 | AGI number: AT5G45430.2 uORF ′5 STOP: 15 uORF 3′ STOP: 369 leader length: 921 |
| 3619 | AGI number: AT5G45430.2 uORF ′5 STOP: 248 uORF 3′ STOP: 380 leader length: 921 |
| 3620 | AGI number: AT5G45430.2 uORF ′5 STOP: 248 uORF 3′ STOP: 380 leader length: 921 |
| 3621 | AGI number: AT5G45430.2 uORF ′5 STOP: 649 uORF 3′ STOP: 784 leader length: 921 |
| 3622 | AGI number: AT5G45430.2 uORF ′5 STOP: 649 uORF 3′ STOP: 784 leader length: 921 |
| 3623 | AGI number: AT5G45470.1 uORF ′5 STOP: 41 uORF 3′ STOP: 134 leader length: 278 |
| 3624 | AGI number: AT5G45470.1 uORF ′5 STOP: 41 uORF 3′ STOP: 134 leader length: 278 |
| 3625 | AGI number: AT5G45470.1 uORF ′5 STOP: 54 uORF 3′ STOP: 162 leader length: 278 |
| 3626 | AGI number: AT5G45470.1 uORF ′5 STOP: 54 uORF 3′ STOP: 162 leader length: 278 |
| 3627 | AGI number: AT5G45710.2 uORF ′5 STOP: 240 uORF 3′ STOP: 522 leader length: 682 |
| 3628 | AGI number: AT5G45710.2 uORF ′5 STOP: 240 uORF 3′ STOP: 522 leader length: 682 |
| 3629 | AGI number: AT5G45710.2 uORF ′5 STOP: 382 uORF 3′ STOP: 481 leader length: 682 |
| 3630 | AGI number: AT5G45710.2 uORF ′5 STOP: 382 uORF 3′ STOP: 481 leader length: 682 |
| 3631 | AGI number: AT5G45820.1 uORF ′5 STOP: 33 uORF 3′ STOP: 84 leader length: 143 |
| 3632 | AGI number: AT5G45820.1 uORF ′5 STOP: 33 uORF 3′ STOP: 84 leader length: 143 |
| 3633 | AGI number: AT5G47050.1 uORF ′5 STOP: 104 uORF 3′ STOP: 212 leader length: 272 |
| 3634 | AGI number: AT5G47050.1 uORF ′5 STOP: 104 uORF 3′ STOP: 212 leader length: 272 |
| 3635 | AGI number: AT5G47070.1 uORF ′5 STOP: 95 uORF 3′ STOP: 149 leader length: 381 |
| 3636 | AGI number: AT5G47070.1 uORF ′5 STOP: 95 uORF 3′ STOP: 149 leader length: 381 |
| 3637 | AGI number: AT5G47100.1 uORF ′5 STOP: 199 uORF 3′ STOP: 256 leader length: 325 |
| 3638 | AGI number: AT5G47100.1 uORF ′5 STOP: 199 uORF 3′ STOP: 256 leader length: 325 |
| 3639 | AGI number: AT5G47220.1 uORF ′5 STOP: 21 uORF 3′ STOP: 171 leader length: 69 |
| 3640 | AGI number: AT5G47220.1 uORF ′5 STOP: 21 uORF 3′ STOP: 171 leader length: 69 |
| 3641 | AGI number: AT5G47250.1 uORF ′5 STOP: 43 uORF 3′ STOP: 196 leader length: 169 |
| 3642 | AGI number: AT5G47250.1 uORF ′5 STOP: 43 uORF 3′ STOP: 196 leader length: 169 |
| 3643 | AGI number: AT5G47430.1 uORF ′5 STOP: 77 uORF 3′ STOP: 203 leader length: 433 |
| 3644 | AGI number: AT5G47430.1 uORF ′5 STOP: 77 uORF 3′ STOP: 203 leader length: 433 |
| 3645 | AGI number: AT5G47430.2 uORF ′5 STOP: 45 uORF 3′ STOP: 120 leader length: 437 |
| 3646 | AGI number: AT5G47430.2 uORF ′5 STOP: 45 uORF 3′ STOP: 120 leader length: 437 |
| 3647 | AGI number: AT5G47430.3 uORF ′5 STOP: 80 uORF 3′ STOP: 155 leader length: 468 |
| 3648 | AGI number: AT5G47430.3 uORF ′5 STOP: 80 uORF 3′ STOP: 155 leader length: 468 |
| 3649 | AGI number: AT5G47430.3 uORF ′5 STOP: 112 uORF 3′ STOP: 238 leader length: 468 |
| 3650 | AGI number: AT5G47430.3 uORF ′5 STOP: 112 uORF 3′ STOP: 238 leader length: 468 |
| 3651 | AGI number: AT5G47520.1 uORF ′5 STOP: 145 uORF 3′ STOP: 199 leader length: 397 |
| 3652 | AGI number: AT5G47520.1 uORF ′5 STOP: 145 uORF 3′ STOP: 199 leader length: 397 |
| 3653 | AGI number: AT5G47710.1 uORF ′5 STOP: 4 uORF 3′ STOP: 61 leader length: 176 |
| 3654 | AGI number: AT5G47710.1 uORF ′5 STOP: 4 uORF 3′ STOP: 61 leader length: 176 |
| 3655 | AGI number: AT5G47720.5 uORF ′5 STOP: 45 uORF 3′ STOP: 126 leader length: 209 |
| 3656 | AGI number: AT5G47720.5 uORF ′5 STOP: 45 uORF 3′ STOP: 126 leader length: 209 |
| 3657 | AGI number: AT5G47730.2 uORF ′5 STOP: 425 uORF 3′ STOP: 530 leader length: 735 |
| 3658 | AGI number: AT5G47730.2 uORF ′5 STOP: 425 uORF 3′ STOP: 530 leader length: 735 |
| 3659 | AGI number: AT5G47730.2 uORF ′5 STOP: 152 uORF 3′ STOP: 281 leader length: 735 |
| 3660 | AGI number: AT5G47730.2 uORF ′5 STOP: 152 uORF 3′ STOP: 281 leader length: 735 |
| 3661 | AGI number: AT5G47730.2 uORF ′5 STOP: 393 uORF 3′ STOP: 513 leader length: 735 |
| 3662 | AGI number: AT5G47730.2 uORF ′5 STOP: 393 uORF 3′ STOP: 513 leader length: 735 |
| 3663 | AGI number: AT5G47970.1 uORF ′5 STOP: 164 uORF 3′ STOP: 269 leader length: 680 |
| 3664 | AGI number: AT5G47970.1 uORF ′5 STOP: 164 uORF 3′ STOP: 269 leader length: 680 |
| 3665 | AGI number: AT5G47970.1 uORF ′5 STOP: 247 uORF 3′ STOP: 307 leader length: 680 |
| 3666 | AGI number: AT5G47970.1 uORF ′5 STOP: 247 uORF 3′ STOP: 307 leader length: 680 |
| 3667 | AGI number: AT5G48220.3 uORF ′5 STOP: 132 uORF 3′ STOP: 387 leader length: 416 |
| 3668 | AGI number: AT5G48220.3 uORF ′5 STOP: 132 uORF 3′ STOP: 387 leader length: 416 |
| 3669 | AGI number: AT5G48220.3 uORF ′5 STOP: 323 uORF 3′ STOP: 395 leader length: 416 |
| 3670 | AGI number: AT5G48220.3 uORF ′5 STOP: 323 uORF 3′ STOP: 395 leader length: 416 |
| 3671 | AGI number: AT5G48230.1 uORF ′5 STOP: 227 uORF 3′ STOP: 344 leader length: 403 |
| 3672 | AGI number: AT5G48230.1 uORF ′5 STOP: 227 uORF 3′ STOP: 344 leader length: 403 |
| 3673 | AGI number: AT5G48580.1 uORF ′5 STOP: 61 uORF 3′ STOP: 241 leader length: 460 |
| 3674 | AGI number: AT5G48580.1 uORF ′5 STOP: 61 uORF 3′ STOP: 241 leader length: 460 |
| 3675 | AGI number: AT5G48580.1 uORF ′5 STOP: 174 uORF 3′ STOP: 267 leader length: 460 |
| 3676 | AGI number: AT5G48580.1 uORF ′5 STOP: 174 uORF 3′ STOP: 267 leader length: 460 |
| 3677 | AGI number: AT5G48610.1 uORF ′5 STOP: 233 uORF 3′ STOP: 311 leader length: 597 |
| 3678 | AGI number: AT5G48610.1 uORF ′5 STOP: 233 uORF 3′ STOP: 311 leader length: 597 |
| 3679 | AGI number: AT5G48610.1 uORF ′5 STOP: 240 uORF 3′ STOP: 303 leader length: 597 |
| 3680 | AGI number: AT5G48610.1 uORF ′5 STOP: 240 uORF 3′ STOP: 303 leader length: 597 |
| 3681 | AGI number: AT5G48610.1 uORF ′5 STOP: 244 uORF 3′ STOP: 298 leader length: 597 |
| 3682 | AGI number: AT5G48610.1 uORF ′5 STOP: 244 uORF 3′ STOP: 298 leader length: 597 |
| 3683 | AGI number: AT5G48655.3 uORF ′5 STOP: 40 uORF 3′ STOP: 115 leader length: 539 |
| 3684 | AGI number: AT5G48655.3 uORF ′5 STOP: 40 uORF 3′ STOP: 115 leader length: 539 |
| 3685 | AGI number: AT5G48660.1 uORF ′5 STOP: 108 uORF 3′ STOP: 174 leader length: 339 |
| 3686 | AGI number: AT5G48660.1 uORF ′5 STOP: 108 uORF 3′ STOP: 174 leader length: 339 |
| 3687 | AGI number: AT5G49470.1 uORF ′5 STOP: 945 uORF 3′ STOP: 1002 leader length: 1101 |
| 3688 | AGI number: AT5G49470.1 uORF ′5 STOP: 945 uORF 3′ STOP: 1002 leader length: 1101 |
| 3689 | AGI number: AT5G49610.1 uORF ′5 STOP: 28 uORF 3′ STOP: 121 leader length: 202 |
| 3690 | AGI number: AT5G49610.1 uORF ′5 STOP: 28 uORF 3′ STOP: 121 leader length: 202 |
| 3691 | AGI number: AT5G50010.1 uORF ′5 STOP: 12 uORF 3′ STOP: 507 leader length: 583 |
| 3692 | AGI number: AT5G50010.1 uORF ′5 STOP: 12 uORF 3′ STOP: 507 leader length: 583 |
| 3693 | AGI number: AT5G50010.1 uORF ′5 STOP: 226 uORF 3′ STOP: 295 leader length: 583 |
| 3694 | AGI number: AT5G50010.1 uORF ′5 STOP: 226 uORF 3′ STOP: 295 leader length: 583 |
| 3695 | AGI number: AT5G50010.1 uORF ′5 STOP: 559 uORF 3′ STOP: 688 leader length: 583 |
| 3696 | AGI number: AT5G50010.1 uORF ′5 STOP: 559 uORF 3′ STOP: 688 leader length: 583 |
| 3697 | AGI number: AT5G50012.1 uORF ′5 STOP: 12 uORF 3′ STOP: 507 leader length: 132 |
| 3698 | AGI number: AT5G50012.1 uORF ′5 STOP: 12 uORF 3′ STOP: 507 leader length: 132 |
| 3699 | AGI number: AT5G50180.1 uORF ′5 STOP: 158 uORF 3′ STOP: 365 leader length: 520 |
| 3700 | AGI number: AT5G50180.1 uORF ′5 STOP: 158 uORF 3′ STOP: 365 leader length: 520 |
| 3701 | AGI number: AT5G50400.1 uORF ′5 STOP: 18 uORF 3′ STOP: 141 leader length: 238 |
| 3702 | AGI number: AT5G50400.1 uORF ′5 STOP: 18 uORF 3′ STOP: 141 leader length: 238 |
| 3703 | AGI number: AT5G50400.1 uORF ′5 STOP: 82 uORF 3′ STOP: 148 leader length: 238 |
| 3704 | AGI number: AT5G50400.1 uORF ′5 STOP: 82 uORF 3′ STOP: 148 leader length: 238 |
| 3705 | AGI number: AT5G50430.1 uORF ′5 STOP: 4 uORF 3′ STOP: 79 leader length: 291 |
| 3706 | AGI number: AT5G50430.1 uORF ′5 STOP: 4 uORF 3′ STOP: 79 leader length: 291 |
| 3707 | AGI number: AT5G50430.3 uORF ′5 STOP: 4 uORF 3′ STOP: 79 leader length: 291 |
| 3708 | AGI number: AT5G50430.3 uORF ′5 STOP: 4 uORF 3′ STOP: 79 leader length: 291 |
| 3709 | AGI number: AT5G50565.1 uORF ′5 STOP: 55 uORF 3′ STOP: 265 leader length: 348 |
| 3710 | AGI number: AT5G50565.1 uORF ′5 STOP: 55 uORF 3′ STOP: 265 leader length: 348 |
| 3711 | AGI number: AT5G50565.1 uORF ′5 STOP: 165 uORF 3′ STOP: 243 leader length: 348 |
| 3712 | AGI number: AT5G50565.1 uORF ′5 STOP: 165 uORF 3′ STOP: 243 leader length: 348 |
| 3713 | AGI number: AT5G51060.1 uORF ′5 STOP: 44 uORF 3′ STOP: 134 leader length: 256 |
| 3714 | AGI number: AT5G51060.1 uORF ′5 STOP: 44 uORF 3′ STOP: 134 leader length: 256 |
| 3715 | AGI number: AT5G52030.1 uORF ′5 STOP: 429 uORF 3′ STOP: 495 leader length: 563 |
| 3716 | AGI number: AT5G52030.1 uORF ′5 STOP: 429 uORF 3′ STOP: 495 leader length: 563 |
| 3717 | AGI number: AT5G52040.4 uORF ′5 STOP: 121 uORF 3′ STOP: 220 leader length: 544 |
| 3718 | AGI number: AT5G52040.4 uORF ′5 STOP: 121 uORF 3′ STOP: 220 leader length: 544 |
| 3719 | AGI number: AT5G52530.1 uORF ′5 STOP: 25 uORF 3′ STOP: 106 leader length: 413 |
| 3720 | AGI number: AT5G52530.1 uORF ′5 STOP: 25 uORF 3′ STOP: 106 leader length: 413 |
| 3721 | AGI number: AT5G52530.1 uORF ′5 STOP: 245 uORF 3′ STOP: 299 leader length: 413 |
| 3722 | AGI number: AT5G52530.1 uORF ′5 STOP: 245 uORF 3′ STOP: 299 leader length: 413 |
| 3723 | AGI number: AT5G52530.2 uORF ′5 STOP: 3 uORF 3′ STOP: 84 leader length: 407 |
| 3724 | AGI number: AT5G52530.2 uORF ′5 STOP: 3 uORF 3′ STOP: 84 leader length: 407 |
| 3725 | AGI number: AT5G52550.1 uORF ′5 STOP: 117 uORF 3′ STOP: 333 leader length: 454 |
| 3726 | AGI number: AT5G52550.1 uORF ′5 STOP: 117 uORF 3′ STOP: 333 leader length: 454 |
| 3727 | AGI number: AT5G52860.1 uORF ′5 STOP: 9 uORF 3′ STOP: 72 leader length: 22 |
| 3728 | AGI number: AT5G52860.1 uORF ′5 STOP: 9 uORF 3′ STOP: 72 leader length: 22 |
| 3729 | AGI number: AT5G52890.2 uORF ′5 STOP: 69 uORF 3′ STOP: 174 leader length: 276 |
| 3730 | AGI number: AT5G52890.2 uORF ′5 STOP: 69 uORF 3′ STOP: 174 leader length: 276 |
| 3731 | AGI number: AT5G53180.2 uORF ′5 STOP: 395 uORF 3′ STOP: 500 leader length: 495 |
| 3732 | AGI number: AT5G53180.2 uORF ′5 STOP: 395 uORF 3′ STOP: 500 leader length: 495 |
| 3733 | AGI number: AT5G53250.1 uORF ′5 STOP: 89 uORF 3′ STOP: 293 leader length: 95 |
| 3734 | AGI number: AT5G53250.1 uORF ′5 STOP: 89 uORF 3′ STOP: 293 leader length: 95 |
| 3735 | AGI number: AT5G53550.1 uORF ′5 STOP: 110 uORF 3′ STOP: 224 leader length: 327 |
| 3736 | AGI number: AT5G53550.1 uORF ′5 STOP: 110 uORF 3′ STOP: 224 leader length: 327 |
| 3737 | AGI number: AT5G53550.1 uORF ′5 STOP: 136 uORF 3′ STOP: 235 leader length: 327 |
| 3738 | AGI number: AT5G53550.1 uORF ′5 STOP: 136 uORF 3′ STOP: 235 leader length: 327 |
| 3739 | AGI number: AT5G53550.2 uORF ′5 STOP: 136 uORF 3′ STOP: 319 leader length: 411 |
| 3740 | AGI number: AT5G53550.2 uORF ′5 STOP: 136 uORF 3′ STOP: 319 leader length: 411 |
| 3741 | AGI number: AT5G53590.1 uORF ′5 STOP: 49 uORF 3′ STOP: 163 leader length: 296 |
| 3742 | AGI number: AT5G53590.1 uORF ′5 STOP: 49 uORF 3′ STOP: 163 leader length: 296 |
| 3743 | AGI number: AT5G53620.2 uORF ′5 STOP: 17 uORF 3′ STOP: 77 leader length: 247 |
| 3744 | AGI number: AT5G53620.2 uORF ′5 STOP: 17 uORF 3′ STOP: 77 leader length: 247 |
| 3745 | AGI number: AT5G53760.1 uORF ′5 STOP: 77 uORF 3′ STOP: 206 leader length: 478 |
| 3746 | AGI number: AT5G53760.1 uORF ′5 STOP: 77 uORF 3′ STOP: 206 leader length: 478 |
| 3747 | AGI number: AT5G53760.1 uORF ′5 STOP: 114 uORF 3′ STOP: 210 leader length: 478 |
| 3748 | AGI number: AT5G53760.1 uORF ′5 STOP: 114 uORF 3′ STOP: 210 leader length: 478 |
| 3749 | AGI number: AT5G53880.1 uORF ′5 STOP: 78 uORF 3′ STOP: 306 leader length: 108 |
| 3750 | AGI number: AT5G53880.1 uORF ′5 STOP: 78 uORF 3′ STOP: 306 leader length: 108 |
| 3751 | AGI number: AT5G54130.3 uORF ′5 STOP: 159 uORF 3′ STOP: 219 leader length: 300 |
| 3752 | AGI number: AT5G54130.3 uORF ′5 STOP: 159 uORF 3′ STOP: 219 leader length: 300 |
| 3753 | AGI number: AT5G54650.2 uORF ′5 STOP: 205 uORF 3′ STOP: 268 leader length: 235 |
| 3754 | AGI number: AT5G54650.2 uORF ′5 STOP: 205 uORF 3′ STOP: 268 leader length: 235 |
| 3755 | AGI number: AT5G54670.1 uORF ′5 STOP: 90 uORF 3′ STOP: 165 leader length: 279 |
| 3756 | AGI number: AT5G54670.1 uORF ′5 STOP: 90 uORF 3′ STOP: 165 leader length: 279 |
| 3757 | AGI number: AT5G54730.1 uORF ′5 STOP: 10 uORF 3′ STOP: 154 leader length: 537 |
| 3758 | AGI number: AT5G54730.1 uORF ′5 STOP: 10 uORF 3′ STOP: 154 leader length: 537 |
| 3759 | AGI number: AT5G54760.3 uORF ′5 STOP: 64 uORF 3′ STOP: 148 leader length: 247 |
| 3760 | AGI number: AT5G54760.3 uORF ′5 STOP: 64 uORF 3′ STOP: 148 leader length: 247 |
| 3761 | AGI number: AT5G55120.1 uORF ′5 STOP: 152 uORF 3′ STOP: 338 leader length: 420 |
| 3762 | AGI number: AT5G55120.1 uORF ′5 STOP: 152 uORF 3′ STOP: 338 leader length: 420 |
| 3763 | AGI number: AT5G55120.1 uORF ′5 STOP: 274 uORF 3′ STOP: 331 leader length: 420 |
| 3764 | AGI number: AT5G55120.1 uORF ′5 STOP: 274 uORF 3′ STOP: 331 leader length: 420 |
| 3765 | AGI number: AT5G55600.1 uORF ′5 STOP: 136 uORF 3′ STOP: 220 leader length: 849 |
| 3766 | AGI number: AT5G55600.1 uORF ′5 STOP: 136 uORF 3′ STOP: 220 leader length: 849 |
| 3767 | AGI number: AT5G55600.1 uORF ′5 STOP: 738 uORF 3′ STOP: 795 leader length: 849 |
| 3768 | AGI number: AT5G55600.1 uORF ′5 STOP: 738 uORF 3′ STOP: 795 leader length: 849 |
| 3769 | AGI number: AT5G55850.2 uORF ′5 STOP: 68 uORF 3′ STOP: 218 leader length: 241 |
| 3770 | AGI number: AT5G55850.2 uORF ′5 STOP: 68 uORF 3′ STOP: 218 leader length: 241 |
| 3771 | AGI number: AT5G55850.3 uORF ′5 STOP: 72 uORF 3′ STOP: 222 leader length: 245 |
| 3772 | AGI number: AT5G55850.3 uORF ′5 STOP: 72 uORF 3′ STOP: 222 leader length: 245 |
| 3773 | AGI number: AT5G55910.1 uORF ′5 STOP: 5 uORF 3′ STOP: 140 leader length: 357 |
| 3774 | AGI number: AT5G55910.1 uORF ′5 STOP: 5 uORF 3′ STOP: 140 leader length: 357 |
| 3775 | AGI number: AT5G55910.1 uORF ′5 STOP: 28 uORF 3′ STOP: 133 leader length: 357 |
| 3776 | AGI number: AT5G55910.1 uORF ′5 STOP: 28 uORF 3′ STOP: 133 leader length: 357 |
| 3777 | AGI number: AT5G55970.2 uORF ′5 STOP: 129 uORF 3′ STOP: 279 leader length: 546 |
| 3778 | AGI number: AT5G55970.2 uORF ′5 STOP: 129 uORF 3′ STOP: 279 leader length: 546 |
| 3779 | AGI number: AT5G55970.2 uORF ′5 STOP: 199 uORF 3′ STOP: 274 leader length: 546 |
| 3780 | AGI number: AT5G55970.2 uORF ′5 STOP: 199 uORF 3′ STOP: 274 leader length: 546 |
| 3781 | AGI number: AT5G56250.2 uORF ′5 STOP: 120 uORF 3′ STOP: 285 leader length: 208 |
| 3782 | AGI number: AT5G56250.2 uORF ′5 STOP: 120 uORF 3′ STOP: 285 leader length: 208 |
| 3783 | AGI number: AT5G56790.1 uORF ′5 STOP: 117 uORF 3′ STOP: 240 leader length: 671 |
| 3784 | AGI number: AT5G56790.1 uORF ′5 STOP: 117 uORF 3′ STOP: 240 leader length: 671 |
| 3785 | AGI number: AT5G56900.1 uORF ′5 STOP: 317 uORF 3′ STOP: 473 leader length: 663 |
| 3786 | AGI number: AT5G56900.1 uORF ′5 STOP: 317 uORF 3′ STOP: 473 leader length: 663 |
| 3787 | AGI number: AT5G57015.1 uORF ′5 STOP: 33 uORF 3′ STOP: 201 leader length: 411 |
| 3788 | AGI number: AT5G57015.1 uORF ′5 STOP: 33 uORF 3′ STOP: 201 leader length: 411 |
| 3789 | AGI number: AT5G57050.1 uORF ′5 STOP: 229 uORF 3′ STOP: 358 leader length: 485 |
| 3790 | AGI number: AT5G57050.1 uORF ′5 STOP: 229 uORF 3′ STOP: 358 leader length: 485 |
| 3791 | AGI number: AT5G57050.1 uORF ′5 STOP: 236 uORF 3′ STOP: 314 leader length: 485 |
| 3792 | AGI number: AT5G57050.1 uORF ′5 STOP: 236 uORF 3′ STOP: 314 leader length: 485 |
| 3793 | AGI number: AT5G57180.1 uORF ′5 STOP: 33 uORF 3′ STOP: 99 leader length: 551 |
| 3794 | AGI number: AT5G57180.1 uORF ′5 STOP: 33 uORF 3′ STOP: 99 leader length: 551 |
| 3795 | AGI number: AT5G57180.1 uORF ′5 STOP: 202 uORF 3′ STOP: 307 leader length: 551 |
| 3796 | AGI number: AT5G57180.1 uORF ′5 STOP: 202 uORF 3′ STOP: 307 leader length: 551 |
| 3797 | AGI number: AT5G57180.2 uORF ′5 STOP: 26 uORF 3′ STOP: 131 leader length: 375 |
| 3798 | AGI number: AT5G57180.2 uORF ′5 STOP: 26 uORF 3′ STOP: 131 leader length: 375 |
| 3799 | AGI number: AT5G57180.3 uORF ′5 STOP: 33 uORF 3′ STOP: 99 leader length: 551 |
| 3800 | AGI number: AT5G57180.3 uORF ′5 STOP: 33 uORF 3′ STOP: 99 leader length: 551 |
| 3801 | AGI number: AT5G57180.3 uORF ′5 STOP: 202 uORF 3′ STOP: 307 leader length: 551 |
| 3802 | AGI number: AT5G57180.3 uORF ′5 STOP: 202 uORF 3′ STOP: 307 leader length: 551 |
| 3803 | AGI number: AT5G57290.1 uORF ′5 STOP: 75 uORF 3′ STOP: 486 leader length: 91 |
| 3804 | AGI number: AT5G57290.1 uORF ′5 STOP: 75 uORF 3′ STOP: 486 leader length: 91 |
| 3805 | AGI number: AT5G57290.2 uORF ′5 STOP: 75 uORF 3′ STOP: 402 leader length: 91 |
| 3806 | AGI number: AT5G57290.2 uORF ′5 STOP: 75 uORF 3′ STOP: 402 leader length: 91 |
| 3807 | AGI number: AT5G57290.3 uORF ′5 STOP: 75 uORF 3′ STOP: 483 leader length: 91 |
| 3808 | AGI number: AT5G57290.3 uORF ′5 STOP: 75 uORF 3′ STOP: 483 leader length: 91 |
| 3809 | AGI number: AT5G57340.1 uORF ′5 STOP: 328 uORF 3′ STOP: 403 leader length: 382 |
| 3810 | AGI number: AT5G57340.1 uORF ′5 STOP: 328 uORF 3′ STOP: 403 leader length: 382 |
| 3811 | AGI number: AT5G57550.1 uORF ′5 STOP: 4 uORF 3′ STOP: 157 leader length: 37 |
| 3812 | AGI number: AT5G57550.1 uORF ′5 STOP: 4 uORF 3′ STOP: 157 leader length: 37 |
| 3813 | AGI number: AT5G57565.1 uORF ′5 STOP: 100 uORF 3′ STOP: 199 leader length: 526 |
| 3814 | AGI number: AT5G57565.1 uORF ′5 STOP: 100 uORF 3′ STOP: 199 leader length: 526 |
| 3815 | AGI number: AT5G57610.1 uORF ′5 STOP: 248 uORF 3′ STOP: 380 leader length: 433 |
| 3816 | AGI number: AT5G57610.1 uORF ′5 STOP: 248 uORF 3′ STOP: 380 leader length: 433 |
| 3817 | AGI number: AT5G57790.1 uORF ′5 STOP: 48 uORF 3′ STOP: 153 leader length: 185 |
| 3818 | AGI number: AT5G57790.1 uORF ′5 STOP: 48 uORF 3′ STOP: 153 leader length: 185 |
| 3819 | AGI number: AT5G58200.1 uORF ′5 STOP: 18 uORF 3′ STOP: 225 leader length: 448 |
| 3820 | AGI number: AT5G58200.1 uORF ′5 STOP: 18 uORF 3′ STOP: 225 leader length: 448 |
| 3821 | AGI number: AT5G58200.1 uORF ′5 STOP: 121 uORF 3′ STOP: 208 leader length: 448 |
| 3822 | AGI number: AT5G58200.1 uORF ′5 STOP: 121 uORF 3′ STOP: 208 leader length: 448 |
| 3823 | AGI number: AT5G58200.1 uORF ′5 STOP: 125 uORF 3′ STOP: 197 leader length: 448 |
| 3824 | AGI number: AT5G58200.1 uORF ′5 STOP: 125 uORF 3′ STOP: 197 leader length: 448 |
| 3825 | AGI number: AT5G58370.1 uORF ′5 STOP: 45 uORF 3′ STOP: 186 leader length: 241 |
| 3826 | AGI number: AT5G58370.1 uORF ′5 STOP: 45 uORF 3′ STOP: 186 leader length: 241 |
| 3827 | AGI number: AT5G58540.3 uORF ′5 STOP: 100 uORF 3′ STOP: 364 leader length: 770 |
| 3828 | AGI number: AT5G58540.3 uORF ′5 STOP: 100 uORF 3′ STOP: 364 leader length: 770 |
| 3829 | AGI number: AT5G58930.1 uORF ′5 STOP: 231 uORF 3′ STOP: 300 leader length: 367 |
| 3830 | AGI number: AT5G58930.1 uORF ′5 STOP: 231 uORF 3′ STOP: 300 leader length: 367 |
| 3831 | AGI number: AT5G58960.3 uORF ′5 STOP: 40 uORF 3′ STOP: 100 leader length: 250 |
| 3832 | AGI number: AT5G58960.3 uORF ′5 STOP: 40 uORF 3′ STOP: 100 leader length: 250 |
| 3833 | AGI number: AT5G59010.2 uORF ′5 STOP: 184 uORF 3′ STOP: 244 leader length: 646 |
| 3834 | AGI number: AT5G59010.2 uORF ′5 STOP: 184 uORF 3′ STOP: 244 leader length: 646 |
| 3835 | AGI number: AT5G59370.2 uORF ′5 STOP: 360 uORF 3′ STOP: 483 leader length: 370 |
| 3836 | AGI number: AT5G59370.2 uORF ′5 STOP: 360 uORF 3′ STOP: 483 leader length: 370 |
| 3837 | AGI number: AT5G59430.2 uORF ′5 STOP: 51 uORF 3′ STOP: 117 leader length: 369 |
| 3838 | AGI number: AT5G59430.2 uORF ′5 STOP: 51 uORF 3′ STOP: 117 leader length: 369 |
| 3839 | AGI number: AT5G59780.1 uORF ′5 STOP: 16 uORF 3′ STOP: 229 leader length: 387 |
| 3840 | AGI number: AT5G59780.1 uORF ′5 STOP: 16 uORF 3′ STOP: 229 leader length: 387 |
| 3841 | AGI number: AT5G59780.2 uORF ′5 STOP: 2 uORF 3′ STOP: 215 leader length: 162 |
| 3842 | AGI number: AT5G59780.2 uORF ′5 STOP: 2 uORF 3′ STOP: 215 leader length: 162 |
| 3843 | AGI number: AT5G59950.5 uORF ′5 STOP: 47 uORF 3′ STOP: 125 leader length: 296 |
| 3844 | AGI number: AT5G59950.5 uORF ′5 STOP: 47 uORF 3′ STOP: 125 leader length: 296 |
| 3845 | AGI number: AT5G60050.1 uORF ′5 STOP: 104 uORF 3′ STOP: 218 leader length: 365 |
| 3846 | AGI number: AT5G60050.1 uORF ′5 STOP: 104 uORF 3′ STOP: 218 leader length: 365 |
| 3847 | AGI number: AT5G60100.3 uORF ′5 STOP: 269 uORF 3′ STOP: 401 leader length: 429 |
| 3848 | AGI number: AT5G60100.3 uORF ′5 STOP: 269 uORF 3′ STOP: 401 leader length: 429 |
| 3849 | AGI number: AT5G60100.3 uORF ′5 STOP: 346 uORF 3′ STOP: 412 leader length: 429 |
| 3850 | AGI number: AT5G60100.3 uORF ′5 STOP: 346 uORF 3′ STOP: 412 leader length: 429 |
| 3851 | AGI number: AT5G60100.3 uORF ′5 STOP: 357 uORF 3′ STOP: 420 leader length: 429 |
| 3852 | AGI number: AT5G60100.3 uORF ′5 STOP: 357 uORF 3′ STOP: 420 leader length: 429 |
| 3853 | AGI number: AT5G60450.1 uORF ′5 STOP: 98 uORF 3′ STOP: 323 leader length: 511 |
| 3854 | AGI number: AT5G60450.1 uORF ′5 STOP: 98 uORF 3′ STOP: 323 leader length: 511 |
| 3855 | AGI number: AT5G60548.1 uORF ′5 STOP: 278 uORF 3′ STOP: 380 leader length: 282 |
| 3856 | AGI number: AT5G60548.1 uORF ′5 STOP: 278 uORF 3′ STOP: 380 leader length: 282 |
| 3857 | AGI number: AT5G60550.1 uORF ′5 STOP: 253 uORF 3′ STOP: 361 leader length: 492 |
| 3858 | AGI number: AT5G60550.1 uORF ′5 STOP: 253 uORF 3′ STOP: 361 leader length: 492 |
| 3859 | AGI number: AT5G60550.1 uORF ′5 STOP: 278 uORF 3′ STOP: 380 leader length: 492 |
| 3860 | AGI number: AT5G60550.1 uORF ′5 STOP: 278 uORF 3′ STOP: 380 leader length: 492 |
| 3861 | AGI number: AT5G60570.1 uORF ′5 STOP: 222 uORF 3′ STOP: 345 leader length: 444 |
| 3862 | AGI number: AT5G60570.1 uORF ′5 STOP: 222 uORF 3′ STOP: 345 leader length: 444 |
| 3863 | AGI number: AT5G60570.1 uORF ′5 STOP: 253 uORF 3′ STOP: 328 leader length: 444 |
| 3864 | AGI number: AT5G60570.1 uORF ′5 STOP: 253 uORF 3′ STOP: 328 leader length: 444 |
| 3865 | AGI number: AT5G60580.3 uORF ′5 STOP: 66 uORF 3′ STOP: 309 leader length: 474 |
| 3866 | AGI number: AT5G60580.3 uORF ′5 STOP: 66 uORF 3′ STOP: 309 leader length: 474 |
| 3867 | AGI number: AT5G60690.1 uORF ′5 STOP: 182 uORF 3′ STOP: 311 leader length: 711 |
| 3868 | AGI number: AT5G60690.1 uORF ′5 STOP: 182 uORF 3′ STOP: 311 leader length: 711 |
| 3869 | AGI number: AT5G60750.1 uORF ′5 STOP: 35 uORF 3′ STOP: 86 leader length: 181 |
| 3870 | AGI number: AT5G60750.1 uORF ′5 STOP: 35 uORF 3′ STOP: 86 leader length: 181 |
| 3871 | AGI number: AT5G60890.1 uORF ′5 STOP: 37 uORF 3′ STOP: 154 leader length: 338 |
| 3872 | AGI number: AT5G60890.1 uORF ′5 STOP: 37 uORF 3′ STOP: 154 leader length: 338 |
| 3873 | AGI number: AT5G60940.2 uORF ′5 STOP: 48 uORF 3′ STOP: 375 leader length: 439 |
| 3874 | AGI number: AT5G60940.2 uORF ′5 STOP: 48 uORF 3′ STOP: 375 leader length: 439 |
| 3875 | AGI number: AT5G60940.2 uORF ′5 STOP: 221 uORF 3′ STOP: 371 leader length: 439 |
| 3876 | AGI number: AT5G60940.2 uORF ′5 STOP: 221 uORF 3′ STOP: 371 leader length: 439 |
| 3877 | AGI number: AT5G61010.1 uORF ′5 STOP: 419 uORF 3′ STOP: 533 leader length: 714 |
| 3878 | AGI number: AT5G61010.1 uORF ′5 STOP: 419 uORF 3′ STOP: 533 leader length: 714 |
| 3879 | AGI number: AT5G61010.1 uORF ′5 STOP: 189 uORF 3′ STOP: 342 leader length: 714 |
| 3880 | AGI number: AT5G61010.1 uORF ′5 STOP: 189 uORF 3′ STOP: 342 leader length: 714 |
| 3881 | AGI number: AT5G61010.1 uORF ′5 STOP: 456 uORF 3′ STOP: 528 leader length: 714 |
| 3882 | AGI number: AT5G61010.1 uORF ′5 STOP: 456 uORF 3′ STOP: 528 leader length: 714 |
| 3883 | AGI number: AT5G61010.1 uORF ′5 STOP: 463 uORF 3′ STOP: 574 leader length: 714 |
| 3884 | AGI number: AT5G61010.1 uORF ′5 STOP: 463 uORF 3′ STOP: 574 leader length: 714 |
| 3885 | AGI number: AT5G61010.2 uORF ′5 STOP: 372 uORF 3′ STOP: 486 leader length: 667 |
| 3886 | AGI number: AT5G61010.2 uORF ′5 STOP: 372 uORF 3′ STOP: 486 leader length: 667 |
| 3887 | AGI number: AT5G61010.2 uORF ′5 STOP: 409 uORF 3′ STOP: 481 leader length: 667 |
| 3888 | AGI number: AT5G61010.2 uORF ′5 STOP: 409 uORF 3′ STOP: 481 leader length: 667 |
| 3889 | AGI number: AT5G61010.2 uORF ′5 STOP: 416 uORF 3′ STOP: 527 leader length: 667 |
| 3890 | AGI number: AT5G61010.2 uORF ′5 STOP: 416 uORF 3′ STOP: 527 leader length: 667 |
| 3891 | AGI number: AT5G61230.1 uORF ′5 STOP: 235 uORF 3′ STOP: 385 leader length: 620 |
| 3892 | AGI number: AT5G61230.1 uORF ′5 STOP: 235 uORF 3′ STOP: 385 leader length: 620 |
| 3893 | AGI number: AT5G61230.1 uORF ′5 STOP: 332 uORF 3′ STOP: 389 leader length: 620 |
| 3894 | AGI number: AT5G61230.1 uORF ′5 STOP: 332 uORF 3′ STOP: 389 leader length: 620 |
| 3895 | AGI number: AT5G61380.1 uORF ′5 STOP: 298 uORF 3′ STOP: 370 leader length: 476 |
| 3896 | AGI number: AT5G61380.1 uORF ′5 STOP: 298 uORF 3′ STOP: 370 leader length: 476 |
| 3897 | AGI number: AT5G61420.1 uORF ′5 STOP: 34 uORF 3′ STOP: 175 leader length: 617 |
| 3898 | AGI number: AT5G61420.1 uORF ′5 STOP: 34 uORF 3′ STOP: 175 leader length: 617 |
| 3899 | AGI number: AT5G61540.2 uORF ′5 STOP: 299 uORF 3′ STOP: 353 leader length: 424 |
| 3900 | AGI number: AT5G61540.2 uORF ′5 STOP: 299 uORF 3′ STOP: 353 leader length: 424 |
| 3901 | AGI number: AT5G61540.3 uORF ′5 STOP: 288 uORF 3′ STOP: 342 leader length: 413 |
| 3902 | AGI number: AT5G61540.3 uORF ′5 STOP: 288 uORF 3′ STOP: 342 leader length: 413 |
| 3903 | AGI number: AT5G61570.1 uORF ′5 STOP: 12 uORF 3′ STOP: 69 leader length: 160 |
| 3904 | AGI number: AT5G61570.1 uORF ′5 STOP: 12 uORF 3′ STOP: 69 leader length: 160 |
| 3905 | AGI number: AT5G61960.1 uORF ′5 STOP: 136 uORF 3′ STOP: 436 leader length: 658 |
| 3906 | AGI number: AT5G61960.1 uORF ′5 STOP: 136 uORF 3′ STOP: 436 leader length: 658 |
| 3907 | AGI number: AT5G62090.1 uORF ′5 STOP: 30 uORF 3′ STOP: 117 leader length: 520 |
| 3908 | AGI number: AT5G62090.1 uORF ′5 STOP: 30 uORF 3′ STOP: 117 leader length: 520 |
| 3909 | AGI number: AT5G62130.2 uORF ′5 STOP: 204 uORF 3′ STOP: 417 leader length: 580 |
| 3910 | AGI number: AT5G62130.2 uORF ′5 STOP: 204 uORF 3′ STOP: 417 leader length: 580 |
| 3911 | AGI number: AT5G62130.2 uORF ′5 STOP: 308 uORF 3′ STOP: 380 leader length: 580 |
| 3912 | AGI number: AT5G62130.2 uORF ′5 STOP: 308 uORF 3′ STOP: 380 leader length: 580 |
| 3913 | AGI number: AT5G62620.1 uORF ′5 STOP: 46 uORF 3′ STOP: 97 leader length: 385 |
| 3914 | AGI number: AT5G62620.1 uORF ′5 STOP: 46 uORF 3′ STOP: 97 leader length: 385 |
| 3915 | AGI number: AT5G62640.3 uORF ′5 STOP: 169 uORF 3′ STOP: 232 leader length: 190 |
| 3916 | AGI number: AT5G62640.3 uORF ′5 STOP: 169 uORF 3′ STOP: 232 leader length: 190 |
| 3917 | AGI number: AT5G62760.1 uORF ′5 STOP: 63 uORF 3′ STOP: 546 leader length: 115 |
| 3918 | AGI number: AT5G62760.1 uORF ′5 STOP: 63 uORF 3′ STOP: 546 leader length: 115 |
| 3919 | AGI number: AT5G64130.2 uORF ′5 STOP: 114 uORF 3′ STOP: 219 leader length: 319 |
| 3920 | AGI number: AT5G64130.2 uORF ′5 STOP: 114 uORF 3′ STOP: 219 leader length: 319 |
| 3921 | AGI number: AT5G64130.2 uORF ′5 STOP: 295 uORF 3′ STOP: 565 leader length: 319 |
| 3922 | AGI number: AT5G64130.2 uORF ′5 STOP: 295 uORF 3′ STOP: 565 leader length: 319 |
| 3923 | AGI number: AT5G64150.1 uORF ′5 STOP: 116 uORF 3′ STOP: 326 leader length: 487 |
| 3924 | AGI number: AT5G64150.1 uORF ′5 STOP: 116 uORF 3′ STOP: 326 leader length: 487 |
| 3925 | AGI number: AT5G64250.1 uORF ′5 STOP: 47 uORF 3′ STOP: 119 leader length: 219 |
| 3926 | AGI number: AT5G64250.1 uORF ′5 STOP: 47 uORF 3′ STOP: 119 leader length: 219 |
| 3927 | AGI number: AT5G64250.1 uORF ′5 STOP: 103 uORF 3′ STOP: 160 leader length: 219 |
| 3928 | AGI number: AT5G64250.1 uORF ′5 STOP: 103 uORF 3′ STOP: 160 leader length: 219 |
| 3929 | AGI number: AT5G64340.1 uORF ′5 STOP: 450 uORF 3′ STOP: 702 leader length: 869 |
| 3930 | AGI number: AT5G64340.1 uORF ′5 STOP: 450 uORF 3′ STOP: 702 leader length: 869 |
| 3931 | AGI number: AT5G64340.1 uORF ′5 STOP: 186 uORF 3′ STOP: 300 leader length: 869 |
| 3932 | AGI number: AT5G64340.1 uORF ′5 STOP: 186 uORF 3′ STOP: 300 leader length: 869 |
| 3933 | AGI number: AT5G64340.1 uORF ′5 STOP: 382 uORF 3′ STOP: 448 leader length: 869 |
| 3934 | AGI number: AT5G64340.1 uORF ′5 STOP: 382 uORF 3′ STOP: 448 leader length: 869 |
| 3935 | AGI number: AT5G64341.1 uORF ′5 STOP: 186 uORF 3′ STOP: 300 leader length: 539 |
| 3936 | AGI number: AT5G64341.1 uORF ′5 STOP: 186 uORF 3′ STOP: 300 leader length: 539 |
| 3937 | AGI number: AT5G64341.1 uORF ′5 STOP: 382 uORF 3′ STOP: 448 leader length: 539 |
| 3938 | AGI number: AT5G64341.1 uORF ′5 STOP: 382 uORF 3′ STOP: 448 leader length: 539 |
| 3939 | AGI number: AT5G64342.1 uORF ′5 STOP: 186 uORF 3′ STOP: 300 leader length: 396 |
| 3940 | AGI number: AT5G64342.1 uORF ′5 STOP: 186 uORF 3′ STOP: 300 leader length: 396 |
| 3941 | AGI number: AT5G64460.5 uORF ′5 STOP: 159 uORF 3′ STOP: 246 leader length: 413 |
| 3942 | AGI number: AT5G64460.5 uORF ′5 STOP: 159 uORF 3′ STOP: 246 leader length: 413 |
| 3943 | AGI number: AT5G64550.1 uORF ′5 STOP: 42 uORF 3′ STOP: 282 leader length: 362 |
| 3944 | AGI number: AT5G64550.1 uORF ′5 STOP: 42 uORF 3′ STOP: 282 leader length: 362 |
| 3945 | AGI number: AT5G64960.2 uORF ′5 STOP: 108 uORF 3′ STOP: 324 leader length: 370 |
| 3946 | AGI number: AT5G64960.2 uORF ′5 STOP: 108 uORF 3′ STOP: 324 leader length: 370 |
| 3947 | AGI number: AT5G64960.2 uORF ′5 STOP: 145 uORF 3′ STOP: 277 leader length: 370 |
| 3948 | AGI number: AT5G64960.2 uORF ′5 STOP: 145 uORF 3′ STOP: 277 leader length: 370 |
| 3949 | AGI number: AT5G65180.1 uORF ′5 STOP: 77 uORF 3′ STOP: 179 leader length: 264 |
| 3950 | AGI number: AT5G65180.1 uORF ′5 STOP: 77 uORF 3′ STOP: 179 leader length: 264 |
| 3951 | AGI number: AT5G65310.1 uORF ′5 STOP: 150 uORF 3′ STOP: 303 leader length: 397 |
| 3952 | AGI number: AT5G65310.1 uORF ′5 STOP: 150 uORF 3′ STOP: 303 leader length: 397 |
| 3953 | AGI number: AT5G65310.1 uORF ′5 STOP: 217 uORF 3′ STOP: 310 leader length: 397 |
| 3954 | AGI number: AT5G65310.1 uORF ′5 STOP: 217 uORF 3′ STOP: 310 leader length: 397 |
| 3955 | AGI number: AT5G65740.1 uORF ′5 STOP: 82 uORF 3′ STOP: 199 leader length: 369 |
| 3956 | AGI number: AT5G65740.1 uORF ′5 STOP: 82 uORF 3′ STOP: 199 leader length: 369 |
| 3957 | AGI number: AT5G65740.1 uORF ′5 STOP: 330 uORF 3′ STOP: 483 leader length: 369 |
| 3958 | AGI number: AT5G65740.1 uORF ′5 STOP: 330 uORF 3′ STOP: 483 leader length: 369 |
| 3959 | AGI number: AT5G65740.3 uORF ′5 STOP: 82 uORF 3′ STOP: 175 leader length: 579 |
| 3960 | AGI number: AT5G65740.3 uORF ′5 STOP: 82 uORF 3′ STOP: 175 leader length: 579 |
| 3961 | AGI number: AT5G66005.1 uORF ′5 STOP: 42 uORF 3′ STOP: 219 leader length: 266 |
| 3962 | AGI number: AT5G66005.1 uORF ′5 STOP: 42 uORF 3′ STOP: 219 leader length: 266 |
| 3963 | AGI number: AT5G66005.1 uORF ′5 STOP: 76 uORF 3′ STOP: 271 leader length: 266 |
| 3964 | AGI number: AT5G66005.1 uORF ′5 STOP: 76 uORF 3′ STOP: 271 leader length: 266 |
| 3965 | AGI number: AT5G66040.2 uORF ′5 STOP: 107 uORF 3′ STOP: 176 leader length: 255 |
| 3966 | AGI number: AT5G66040.2 uORF ′5 STOP: 107 uORF 3′ STOP: 176 leader length: 255 |
| 3967 | AGI number: AT5G66040.2 uORF ′5 STOP: 215 uORF 3′ STOP: 512 leader length: 255 |
| 3968 | AGI number: AT5G66040.2 uORF ′5 STOP: 215 uORF 3′ STOP: 512 leader length: 255 |
| 3969 | AGI number: AT5G66050.2 uORF ′5 STOP: 2 uORF 3′ STOP: 401 leader length: 698 |
| 3970 | AGI number: AT5G66050.2 uORF ′5 STOP: 2 uORF 3′ STOP: 401 leader length: 698 |
| 3971 | AGI number: AT5G66110.1 uORF ′5 STOP: 42 uORF 3′ STOP: 114 leader length: 43 |
| 3972 | AGI number: AT5G66110.1 uORF ′5 STOP: 42 uORF 3′ STOP: 114 leader length: 43 |
| 3973 | AGI number: AT5G66250.2 uORF ′5 STOP: 190 uORF 3′ STOP: 256 leader length: 517 |
| 3974 | AGI number: AT5G66250.2 uORF ′5 STOP: 190 uORF 3′ STOP: 256 leader length: 517 |
| 3975 | AGI number: AT5G66310.1 uORF ′5 STOP: 2 uORF 3′ STOP: 185 leader length: 447 |
| 3976 | AGI number: AT5G66310.1 uORF ′5 STOP: 2 uORF 3′ STOP: 185 leader length: 447 |
| 3977 | AGI number: AT5G66420.1 uORF ′5 STOP: 45 uORF 3′ STOP: 174 leader length: 492 |
| 3978 | AGI number: AT5G66420.1 uORF ′5 STOP: 45 uORF 3′ STOP: 174 leader length: 492 |
| 3979 | AGI number: AT5G66600.1 uORF ′5 STOP: 287 uORF 3′ STOP: 398 leader length: 511 |
| 3980 | AGI number: AT5G66600.1 uORF ′5 STOP: 287 uORF 3′ STOP: 398 leader length: 511 |
| 3981 | AGI number: AT5G66600.1 uORF ′5 STOP: 337 uORF 3′ STOP: 427 leader length: 511 |
| 3982 | AGI number: AT5G66600.1 uORF ′5 STOP: 337 uORF 3′ STOP: 427 leader length: 511 |
| 3983 | AGI number: AT5G66730.1 uORF ′5 STOP: 100 uORF 3′ STOP: 232 leader length: 519 |
| 3984 | AGI number: AT5G66730.1 uORF ′5 STOP: 100 uORF 3′ STOP: 232 leader length: 519 |
| 3985 | AGI number: AT5G67440.2 uORF ′5 STOP: 599 uORF 3′ STOP: 761 leader length: 793 |
| 3986 | AGI number: AT5G67440.2 uORF ′5 STOP: 599 uORF 3′ STOP: 761 leader length: 793 |
| 3987 | AGI number: AT5G67600.1 uORF ′5 STOP: 45 uORF 3′ STOP: 408 leader length: 97 |
| 3988 | AGI number: AT5G67600.1 uORF ′5 STOP: 45 uORF 3′ STOP: 408 leader length: 97 |
| 3989 | AGI number: AT5G67620.1 uORF ′5 STOP: 69 uORF 3′ STOP: 159 leader length: 276 |
| 3990 | AGI number: AT5G67620.1 uORF ′5 STOP: 69 uORF 3′ STOP: 159 leader length: 276 |
| 3991 | AGI number: AT5G67620.1 uORF ′5 STOP: 89 uORF 3′ STOP: 146 leader length: 276 |
| 3992 | AGI number: AT5G67620.1 uORF ′5 STOP: 89 uORF 3′ STOP: 146 leader length: 276 |
| 3993 | AGI number: ATMG00410.1 uORF ′5 STOP: 3 uORF 3′ STOP: 87 leader length: 163 |
| 3994 | AGI number: ATMG00410.1 uORF ′5 STOP: 3 uORF 3′ STOP: 87 leader length: 163 |
| 3995 | AGI number: ATMG00730.1 uORF ′5 STOP: 269 uORF 3′ STOP: 323 leader length: 649 |
| 3996 | AGI number: ATMG00730.1 uORF ′5 STOP: 269 uORF 3′ STOP: 323 leader length: 649 |
| 3997 | AGI number: ATMG00730.1 uORF ′5 STOP: 504 uORF 3′ STOP: 570 leader length: 649 |
| 3998 | AGI number: ATMG00730.1 uORF ′5 STOP: 504 uORF 3′ STOP: 570 leader length: 649 |
| 3999 | AT1G01030.1 Symbols: NGA3: NGATHA3. Chr1: 11864-12940 REVERSE LENGTH = 358 |
| 4000 | AT1G01060.1 Symbols: LHY1, LHY: LATE ELONGATED HYPOCOTYL, LATE ELONGATED |
| | HYPOCOTYL 1. Chr1: 33992-37061 REVERSE LENGTH = 645 |
| 4001 | AT1G01160.2 Symbols: GIF2: GRF1-interacting factor 2. Chr1: 72583-73883 FORWARD |
| | LENGTH = 229 |
| 4002 | AT1G01340.2 Symbols: ACBK1, CNGC10, ATCNGC10: cyclic nucleotide gated channel 10. |
| | Chr1: 132414-135216 REVERSE LENGTH = 711 |
| 4003 | AT1G01650.1 Symbols: ATSPPL4, SPPL4: SIGNAL PEPTIDE PEPTIDASE-LIKE 4, ARABIDOPSIS |
| | THALIANA SIGNAL PEPTIDE PEPTIDASE-LIKE 4. Chr1: 233188-237647 REVERSE LENGTH = 540 |
| 4004 | AT1G01780.1 Symbols: PLIM2b: PLIM2b. Chr1: 282919-284082 FORWARD LENGTH = 205 |
| 4005 | AT1G01880.1 Symbols: AtGEN1, GEN1: ortholog of HsGEN1. Chr1: 306558-308991 REVERSE |
| | LENGTH = 599 |
| 4006 | AT1G02010.1 Symbols: SEC1A: secretory 1A. Chr1: 348046-352197 FORWARD LENGTH = 673 |
| 4007 | AT1G02145.3 Symbols: ALG12, EBS4: EMS-MUTAGENIZED BRI1(BRASSINOSTEROID |
| | INSENSITIVE 1) SUPPRESSOR 4, homolog of asparagine-linked glycosylation 12. Chr1: 404627- |
| | 408485 FORWARD LENGTH = 497 |
| 4008 | AT1G02205.3 Symbols: CER22, CER1: ECERIFERUM 22, ECERIFERUM 1. Chr1: 418818-422154 |
| | FORWARD LENGTH = 630 |
| 4009 | AT1G02260.1 Symbols: no symbol available: no full name available. Chr1: 440757-442459 REVERSE |
| | LENGTH = 502 |
| 4010 | AT1G02290.1 Symbols: no symbol available: no full name available. Chr1: 450646-451977 REVERSE |
| | LENGTH = 443 |
| 4011 | AT1G02380.1 Symbols: no symbol available: no full name available. Chr1: 477814-478850 FORWARD |
| | LENGTH = 231 |
| 4012 | AT1G02720.1 Symbols: GATL5, AtGATL5: galacturonosyltransferase-like 5. Chr1: 592115-593200 |
| | FORWARD LENGTH = 361 |
| 4013 | AT1G02880.3 Symbols: TPK1: thiamin pyrophosphokinase1. Chr1: 643063-644485 REVERSE |
| | LENGTH = 267 |
| 4014 | AT1G02930.1 Symbols: ATGSTF3, ATGSTF6, GST1, ERD11, GSTF6, ATGSTI: EARLY RESPONSIVE |
| | TO DEHYDRATION 11, ARABIDOPSIS GLUTATHIONE S-TRANSFERASE 1, ARABIDOPSIS |
| | THALIANA GLUATIONE S-TRANSFERASE F3, glutathione S-transferase 6, GLUTATHIONE S- |
| | TRANSFERASE 1, GLUTATHIONE S-TRANSFERASE. Chr1: 661363-662191 REVERSE |
| | LENGTH = 208 |
| 4015 | AT1G03080.1 Symbols: NET1D: Networked 1D. Chr1: 731794-737332 REVERSE LENGTH = 1733 |
| 4016 | AT1G03310.2 Symbols: ATISA2, BE2, DBE1, ISA2, AtBE2: debranching enzyme 1, BRANCHING |
| | ENZYME 2, ARABIDOPSIS THALIANA ISOAMYLASE 2. Chr1: 813975-816623 FORWARD |
| | LENGTH = 882 |
| 4017 | AT1G03860.1 Symbols: PHB2, ATPHB2: prohibitin 2. Chr1: 979611-981157 REVERSE LENGTH = 286 |
| 4018 | AT1G03930.1 Symbols: CKL9ALPHA, CKL9BETA, ADK1: dual specificity kinase 1, CASEIN KINASE |
| | I-LIKE 9 ALPHA, CASEIN KINASE I-LIKE 9 BETA. Chr1: 1005439-1008118 FORWARD |
| | LENGTH = 471 |
| 4019 | AT1G03960.1 Symbols: no symbol available: no full name available. Chr1: 1014085-1017472 |
| | FORWARD LENGTH = 529 |
| 4020 | AT1G03980.1 Symbols: PCS2, ATPCS2: phytochelatin synthase 2. Chr1: 1019311-1021194 REVERSE |
| | LENGTH = 367 |
| 4021 | AT1G04120.1 Symbols: ABCC5, ATABCC5, MRP5, ATMRP5: Arabidopsis thaliana ATP-binding |
| | cassette C5, multidrug resistance-associated protein 5, MULTIDRUG RESISTANCE PROTEIN 5, ATP- |
| | binding cassette C5. Chr1: 1064848-1070396 REVERSE LENGTH = 1514 |
| 4022 | AT1G04140.2 Symbols: no symbol available: no full name available. Chr1: 1075992-1080321 |
| | REVERSE LENGTH = 793 |
| 4023 | AT1G04300.3 Symbols: no symbol available: no full name available. Chr1: 1148818-1153895 |
| | REVERSE LENGTH = 1082 |
| 4024 | AT1G04440.1 Symbols: CKL13: casein kinase like 13. Chr1: 1202815-1205664 FORWARD |
| | LENGTH = 468 |
| 4025 | AT1G04778.1 Symbols: no symbol available: no full name available. Chr1: 1339947-1340117 |
| | FORWARD LENGTH = 56 |
| 4026 | AT1G04960.2 Symbols: no symbol available: no full name available. Chr1: 1408021-1410424 |
| | REVERSE LENGTH = 334 |
| 4027 | AT1G05160.1 Symbols: KAO1, ATKAO1, CYP88A3: ENT-KAURENOIC ACID OXYDASE |
| | 1, “cytochrome P450, family 88, subfamily A, polypeptide 3”. Chr1: 1487640-1489828 REVERSE |
| | LENGTH = 490 |
| 4028 | AT1G05200.1 Symbols: GLR3.4, ATGLR3.4, GLUR3: glutamate receptor 3.4. Chr1: 1505642-1509002 |
| | FORWARD LENGTH = 959 |
| 4029 | AT1G05230.1 Symbols: HDG2: homeodomain GLABROUS 2. Chr1: 1513388-1517024 REVERSE |
| | LENGTH = 721 |
| 4030 | AT1G05690.1 Symbols: BT3: BTB and TAZ domain protein 3. Chr1: 1707809-1709132 FORWARD |
| | LENGTH = 364 |
| 4031 | AT1G05710.2 Symbols: no symbol available: no full name available. Chr1: 1716198-1717023 |
| | FORWARD LENGTH = 171 |
| 4032 | AT1G05730.1 Symbols: no symbol available: no full name available. Chr1: 1719107-1720159 |
| | FORWARD LENGTH = 149 |
| 4033 | AT1G06150.1 Symbols: EMB1444, LHL1: LONESOME HIGHWAY LIKE 1, EMBRYO DEFECTIVE |
| | 1444. Chr1: 1869228-1873194 REVERSE LENGTH = 734 |
| 4034 | AT1G06270.1 Symbols: no symbol available: no full name available. Chr1: 1918242-1919273 |
| | REVERSE LENGTH = 343 |
| 4035 | AT1G06780.2 Symbols: GAUT6: galacturonosyltransferase 6. Chr1: 2083689-2086853 FORWARD |
| | LENGTH = 602 |
| 4036 | AT1G07030.1 Symbols: no symbol available: no full name available. Chr1: 2158631-2160524 |
| | REVERSE LENGTH = 326 |
| 4037 | AT1G07590.1 Symbols: no symbol available: no full name available. Chr1: 2336649-2338481 |
| | REVERSE LENGTH = 534 |
| 4038 | AT1G07700.3 Symbols: no symbol available: no full name available. Chr1: 2380297-2381127 |
| | FORWARD LENGTH = 217 |
| 4039 | AT1G07780.3 Symbols: PAI1, TRP6: TRANSIENT RECEPTOR POTENTIAL |
| | 6, phosphoribosy lanthranilate isomerase 1. Chr1: 2410352-2411833 REVERSE LENGTH = 275 |
| 4040 | AT1G07960.2 Symbols: ATPDIL5-1, PDIL5-1: PDI-like 5-1. Chrl: 2467681-2468831 FORWARD |
| | LENGTH = 146 |
| 4041 | AT1G08030.1 Symbols: AQC1, HPS7, TPST: hypersensitive to Pi starvation 7, active quiescent |
| | center1, tyrosylprotein sulfotransferase. Chr1: 2489575-2492741 REVERSE LENGTH = 500 |
| 4042 | AT1G08600.3 Symbols: ATRX, CHR20.: Chr1: 2724562-2733431 FORWARD LENGTH = 1479 |
| 4043 | AT1G08620.1 Symbols: PKDM7D.: Chr1: 2737554-2743370 FORWARD LENGTH = 1209 |
| 4044 | AT1G08820.1 Symbols: VAP27-2: vamp/synaptobrevin-associated protein 27-2. Chr1: 2821810-2824412 |
| | REVERSE LENGTH = 386 |
| 4045 | AT1G09180.1 Symbols: ATSARA1A, SARA1A, ATSAR1: SECRETION-ASSOCIATED RAS |
| | 1, secretion-associated RAS super family 1. Chr1: 2965147-2965941 FORWARD LENGTH = 193 |
| 4046 | AT1G09300.1 Symbols: AtICP55.: Chr1: 3003981-3008131 FORWARD LENGTH = 493 |
| 4047 | AT1G09840.1 Symbols: ATSK41, SK41, HIR1, AtHIR1: hypersensitive induced reaction 1, shaggy-like |
| | protein kinase 41. Chr1: 3196114-3199524 REVERSE LENGTH = 421 |
| 4048 | AT1G10120.1 Symbols: CIB4: CRY2-interacting bHLH 4. Chr1: 3304228-3305984 REVERSE |
| | LENGTH = 366 |
| 4049 | AT1G10522.1 Symbols: PRIN2: PLASTID REDOX INSENSITIVE 2. Chr1: 3470009-3471291 |
| | FORWARD LENGTH = 179 |
| 4050 | AT1G10650.1 Symbols: no symbol available: no full name available. Chr1: 3524122-3525318 |
| | REVERSE LENGTH = 339 |
| 4051 | AT1G10740.1 Symbols: no symbol available: no full name available. Chr1: 3568343-3570466 |
| | REVERSE LENGTH = 473 |
| 4052 | AT1G11170.1 Symbols: no symbol available: no full name available. Chr1: 3741724-3744459 |
| | FORWARD LENGTH = 438 |
| 4053 | AT1G11270.1 Symbols: no symbol available: no full name available. Chr1: 3785715-3786653 |
| | REVERSE LENGTH = 312 |
| 4054 | AT1G11450.2 Symbols: UMAMIT27: Usually multiple acids move in and out Transporters 27. |
| | Chr1: 3853470-3855259 FORWARD LENGTH = 301 |
| 4055 | AT1G11755.1 Symbols: LEW1: LEAF WILTING 1. Chr1: 3969987-3971488 REVERSE LENGTH = 254 |
| 4056 | AT1G11790.1 Symbols: AtADTI, ADT1: arogenate dehydratase 1, Arabidopsis thaliana arogenate |
| | dehydratase 1. Chr1: 3981476-3984962 FORWARD LENGTH = 392 |
| 4057 | AT1G12260.1 Symbols: NAC007, VND4, ANAC007, EMB2749: NAC 007, VASCULAR RELATED |
| | NAC-DOMAIN PROTEIN 4, EMBRYO DEFECTIVE 2749. Chr1: 4163058-4164486 REVERSE |
| | LENGTH = 395 |
| 4058 | AT1G12380.1 Symbols: no symbol available: no full name available. Chr1: 4214499-4216880 |
| | REVERSE LENGTH = 793 |
| 4059 | AT1G12440.1 Symbols: no symbol available: no full name available. Chr1: 4241816-4242322 |
| | REVERSE LENGTH = 168 |
| 4060 | AT1G12520.1 Symbols: ATCCS, CCS: copper chaperone for SOD1. Chr1: 4267277-4268900 REVERSE |
| | LENGTH = 320 |
| 4061 | AT1G12800.1 Symbols: SDP: S1 domain-containing RBP. Chr1: 4361778-4365189 REVERSE |
| | LENGTH = 767 |
| 4062 | AT1G12900.1 Symbols: GAPA-2: glyceraldehyde 3-phosphate dehydrogenase A subunit 2. |
| | Chr1: 4392634-4394283 REVERSE LENGTH = 399 |
| 4063 | AT1G12990.1 Symbols: no symbol available: no full name available. Chr1: 4433973-4435552 |
| | FORWARD LENGTH = 392 |
| 4064 | AT1G13120.1 Symbols: AtGLE1, GLE1: A. thaliana homolog of yeast GLE1. Chr1: 4469334-4472775 |
| | REVERSE LENGTH = 611 |
| 4065 | AT1G13195.1 Symbols: no symbol available: no full name available. Chr1: 4501778-4503347 |
| | REVERSE LENGTH = 260 |
| 4066 | AT1G13370.1 Symbols: no symbol available: no full name available. Chr1: 4587926-4588522 |
| | REVERSE LENGTH = 136 |
| 4067 | AT1G13460.1 Symbols: no symbol available: no full name available. Chr1: 4616504-4618180 |
| | FORWARD LENGTH = 492 |
| 4068 | AT1G13640.1 Symbols: no symbol available: no full name available. Chr1: 4677276-4679144 |
| | REVERSE LENGTH = 622 |
| 4069 | AT1G13860.4 Symbols: QUL1: QUASIMODO2 LIKE 1. Chr1: 4743754-4746256 REVERSE |
| | LENGTH = 603 |
| 4070 | AT1G13910.1 Symbols: no symbol available: no full name available. Chr1: 4755955-4757814 |
| | FORWARD LENGTH = 330 |
| 4071 | AT1G13970.1 Symbols: no symbol available: no full name available. Chr1: 4779742-4781882 |
| | REVERSE LENGTH = 504 |
| 4072 | AT1G14020.1 Symbols: no symbol available: no full name available. Chr1: 4802930-4805111 |
| | FORWARD LENGTH = 499 |
| 4073 | AT1G14180.1 Symbols: no symbol available: no full name available. Chr1: 4847828-4848970 |
| | FORWARD LENGTH = 348 |
| 4074 | AT1G14270.1 Symbols: no symbol available: no full name available. Chr1: 4875099-4877195 |
| | REVERSE LENGTH = 353 |
| 4075 | AT1G14560.1 Symbols: CoAc1: CoA Carrier 1. Chr1: 4981300-4983082 FORWARD LENGTH = 331 |
| 4076 | AT1G14590.1 Symbols: no symbol available: no full name available. Chr1: 4998957-5000617 |
| | REVERSE LENGTH = 386 |
| 4077 | AT1G14685.3 Symbols: ATBPC2, BBR/BPC2, BPC2: BASIC PENTACYSTEINE 2, basic pentacysteine |
| | 2. Chr1: 5043086-5043925 FORWARD LENGTH = 279 |
| 4078 | AT1G14820.3 Symbols: no symbol available: no full name available. Chr1: 5105237-5106793 |
| | REVERSE LENGTH = 252 |
| 4079 | AT1G15490.1 Symbols: no symbol available: no full name available. Chr1: 5320859-5323422 |
| | REVERSE LENGTH = 648 |
| 4080 | AT1G15750.1 Symbols: TPL, WSIP1: WUS-INTERACTING PROTEIN 1, TOPLESS. Chr1: 5415086- |
| | 5420359 REVERSE LENGTH = 1131 |
| 4081 | AT1G15920.2 Symbols: no symbol available: no full name available. Chr1: 5469962-5470822 |
| | FORWARD LENGTH = 286 |
| 4082 | AT1G15970.1 Symbols: no symbol available: no full name available. Chr1: 5486544-5488494 |
| | REVERSE LENGTH = 352 |
| 4083 | AT1G16060.1 Symbols: ADAP, WRI3: ARIA-interacting double AP2 domain protein, WRINKLED 3. |
| | Chr1: 5508563-5511609 FORWARD LENGTH = 345 |
| 4084 | AT1G16250.1 Symbols: no symbol available: no full name available. Chr1: 5557214-5558697 |
| | FORWARD LENGTH = 383 |
| 4085 | AT1G17040.2 Symbols: SHA, ATSHA, STATLA: ARABIDOPSIS THALIANA SH2 DOMAIN |
| | PROTEIN A, SH2 domain protein A, STAT-TYPE LINKER-SH2 DOMAIN FACTOR A. Chr1: 5825109- |
| | 5828056 FORWARD LENGTH = 651 |
| 4086 | AT1G17680.1 Symbols: no symbol available: no full name available. Chr1: 6076388-6082160 |
| | FORWARD LENGTH = 896 |
| 4087 | AT1G17720.1 Symbols: ATB BETA.: Chr1: 6093949-6098065 REVERSE LENGTH = 501 |
| 4088 | AT1G17780.2 Symbols: no symbol available: no full name available. Chr1: 6124095-6125166 |
| | FORWARD LENGTH = 263 |
| 4089 | AT1G17890.1 Symbols: GER2.: Chr1: 6154478-6155596 REVERSE LENGTH = 328 |
| 4090 | AT1G17920.1 Symbols: HDG12: homeodomain GLABROUS 12. Chr1: 6162214-6165033 REVERSE |
| | LENGTH = 687 |
| 4091 | AT1G17980.1 Symbols: PAPS1: poly(A) polymerase 1. Chr1: 6187742-6191418 REVERSE |
| | LENGTH = 713 |
| 4092 | AT1G17990.1 Symbols: no symbol available: no full name available. Chr1: 6192455-6193755 |
| | REVERSE LENGTH = 269 |
| 4093 | AT1G18160.1 Symbols: no symbol available: no full name available. Chr1: 6249126-6253835 |
| | FORWARD LENGTH = 992 |
| 4094 | AT1G18330.2 Symbols: EPR1, RVE7: EARLY-PHYTOCHROME-RESPONSIVEI, REVEILLE 7. |
| | Chr1: 6306196-6307718 REVERSE LENGTH = 372 |
| 4095 | AT1G18570.1 Symbols: HIG1, MYB51, AtMYB51, BW51A, BW51B: myb domain protein 51, HIGH |
| | INDOLIC GLUCOSINOLATE 1. Chr1: 6389765-6391026 FORWARD LENGTH = 352 |
| 4096 | AT1G18690.1 Symbols: XXT4: xyloglucan xylosyltransferase 4. Chr1: 6435153-6436694 FORWARD |
| | LENGTH = 513 |
| 4097 | AT1G18750.1 Symbols: AGL65: AGAMOUS-like 65. Chr1: 6467266-6469640 FORWARD |
| | LENGTH = 389 |
| 4098 | AT1G18840.1 Symbols: IQD30: IQ-domain 30. Chr1: 6501068-6503435 REVERSE LENGTH = 572 |
| 4099 | AT1G19220.1 Symbols: IAA22, ARF19, ARF11: AUXIN RESPONSE FACTOR11, auxin response factor |
| | 19, indole-3-acetic acid inducible 22. Chr1: 6628395-6632779 REVERSE LENGTH = 1086 |
| 4100 | AT1G19330.3 Symbols: no symbol available: no full name available. Chrl: 6680824-6683290 |
| | REVERSE LENGTH = 248 |
| 4101 | AT1G19370.1 Symbols: no symbol available: no full name available. Chr1: 6692904-6694721 |
| | REVERSE LENGTH = 605 |
| 4102 | AT1G19396.2 Symbols: no symbol available: no full name available. Chr1: 6709873-6710223 |
| | FORWARD LENGTH = 64 |
| 4103 | AT1G19400.1 Symbols: no symbol available: no full name available. Chr1: 6712222-6713676 |
| | REVERSE LENGTH = 303 |
| 4104 | AT1G19450.1 Symbols: no symbol available: no full name available. Chr1: 6731671-6734633 |
| | REVERSE LENGTH = 488 |
| 4105 | AT1G19700.1 Symbols: BLH10, BEL10: BEL1-like homeodomain 10, BEL1-LIKE HOMEODOMAIN |
| | 10. Chr1: 6809958-6811854 REVERSE LENGTH = 538 |
| 4106 | AT1G19800.2 Symbols: TGD1, ABCI14: ATP-binding cassette 114, trigalactosyldiacylglycerol 1. |
| | Chr1: 6846812-6847954 FORWARD LENGTH = 350 |
| 4107 | AT1G20550.1 Symbols: no symbol available: no full name available. Chr1: 7115485-7117936 |
| | REVERSE LENGTH = 564 |
| 4108 | AT1G20650.1 Symbols: ASG5: ALTERED SEED GERMINATION 5. Chr1: 7158422-7160022 |
| | REVERSE LENGTH = 381 |
| 4109 | AT1G20880.1 Symbols: no symbol available: no full name available. Chr1: 7262879-7264834 |
| | REVERSE LENGTH = 274 |
| 4110 | AT1G21160.1 Symbols: no symbol available: no full name available. Chr1: 7408121-7412455 |
| | REVERSE LENGTH = 1092 |
| 4111 | AT1G21350.3 Symbols: no symbol available: no full name available. Chr1: 7477376-7479012 |
| | REVERSE LENGTH = 252 |
| 4112 | AT1G21560.2 Symbols: no symbol available: no full name available. Chr1: 7555208-7556789 |
| | FORWARD LENGTH = 399 |
| 4113 | AT1G21780.1 Symbols: no symbol available: no full name available. Chr1: 7652476-7653866 |
| | FORWARD LENGTH = 326 |
| 4114 | AT1G21840.1 Symbols: UREF: urease accessory protein F. Chr1: 7666859-7667581 FORWARD |
| | LENGTH = 240 |
| 4115 | AT1G21930.1 Symbols: no symbol available: no full name available. Chr1: 7713466-7714298 |
| | FORWARD LENGTH = 98 |
| 4116 | AT1G22050.1 Symbols: MUB6: membrane-anchored ubiquitin-fold protein 6 precursor. Chr1: 7771897- |
| | 7772843 FORWARD LENGTH = 119 |
| 4117 | AT1G22180.2 Symbols: no symbol available: no full name available. Chr1: 7828434-7829745 |
| | REVERSE LENGTH = 314 |
| 4118 | AT1G22190.1 Symbols: RAP2.4, WIND2: related to AP2 4. Chr1: 7836245-7837030 FORWARD |
| | LENGTH = 261 |
| 4119 | AT1G22520.2 Symbols: no symbol available: no full name available. Chr1: 7952996-7954304 |
| | REVERSE LENGTH = 179 |
| 4120 | AT1G23150.1 Symbols: no symbol available: no full name available. Chr1: 8206948-8207461 |
| | FORWARD LENGTH = 141 |
| 4121 | AT1G23360.1 Symbols: MENG.: Chr1: 8295421-8296893 REVERSE LENGTH = 261 |
| 4122 | AT1G23480.1 Symbols: ATCSLA3, CSLA03, CSLA3, ATCSLA03: CELLULOSE SYNTHASE-LIKE |
| | A3, cellulose synthase-like A3. Chr1: 8333917-8336230 FORWARD LENGTH = 556 |
| 4123 | AT1G23730.1 Symbols: ATBCA3, BCA3: beta carbonic anhydrase 3, BETA CARBONIC ANHYDRASE |
| | 3. Chr1: 8395965-8398014 FORWARD LENGTH = 258 |
| 4124 | AT1G24030.1 Symbols: no symbol available: no full name available. Chr1: 8503394-8505195 |
| | FORWARD LENGTH = 375 |
| 4125 | AT1G24510.1 Symbols: no symbol available: no full name available. Chr1: 8685504-8688101 |
| | REVERSE LENGTH = 535 |
| 4126 | AT1G25280.1 Symbols: AtTLP10, TLP10: tubby like protein 10. Chr1: 8864961-8866608 FORWARD |
| | LENGTH = 445 |
| 4127 | AT1G25420.1 Symbols: ISTL2: IST1-LIKE 2. Chr1: 8916141-8917980 FORWARD LENGTH = 323 |
| 4128 | AT1G25470.1 Symbols: CRF12: cytokinin response factor 12. Chr1: 8944901-8945764 REVERSE |
| | LENGTH = 287 |
| 4129 | AT1G25500.2 Symbols: no symbol available: no full name available. Chr1: 8955437-8957793 |
| | REVERSE LENGTH = 488 |
| 4130 | AT1G26150.1 Symbols: PERK10, AtPERK10: proline-rich extensin-like receptor kinase 10. |
| | Chr1: 9039790-9042873 REVERSE LENGTH = 762 |
| 4131 | AT1G26230.1 Symbols: Cpn60beta4: chaperonin-60beta4. Chr1: 9072388-9075272 REVERSE |
| | LENGTH = 611 |
| 4132 | AT1G26440.3 Symbols: ATUPS5, UPS5: ureide permease 5. Chr1: 9144109-9145673 REVERSE |
| | LENGTH = 413 |
| 4133 | AT1G26520.1 Symbols: no symbol available: no full name available. Chr1: 9163448-9165594 |
| | REVERSE LENGTH = 374 |
| 4134 | AT1G26530.1 Symbols: no symbol available: no full name available. Chr1: 9165890-9167298 |
| | FORWARD LENGTH = 178 |
| 4135 | AT1G26660.2 Symbols: no symbol available: no full name available. Chr1: 9212298-9213765 |
| | FORWARD LENGTH = 177 |
| 4136 | AT1G26850.1 Symbols: no symbol available: no full name available. Chr1: 9301146-9303432 |
| | REVERSE LENGTH = 616 |
| 4137 | AT1G27460.1 Symbols: NPGRI: no pollen germination related 1. Chr1: 9534977-9537424 FORWARD |
| | LENGTH = 694 |
| 4138 | AT1G27760.3 Symbols: ATSAT32, SAT32: SALT-TOLERANCE 32. Chr1: 9668895-9671322 |
| | FORWARD LENGTH = 441 |
| 4139 | AT1G27840.3 Symbols: ATCSA-1.: Chr1: 9693332-9696257 REVERSE LENGTH = 451 |
| 4140 | AT1G27850.1 Symbols: no symbol available: no full name available. Chr1: 9699265-9703701 |
| | FORWARD LENGTH = 1148 |
| 4141 | AT1G28090.1 Symbols: no symbol available: no full name available. Chr1: 9795826-9798891 |
| | FORWARD LENGTH = 541 |
| 4142 | AT1G28135.1 Symbols: no symbol available: no full name available. Chr1: 9829332-9829487 |
| | FORWARD LENGTH = 51 |
| 4143 | AT1G28260.1 Symbols: no symbol available: no full name available. Chr1: 9875776-9878782 |
| | REVERSE LENGTH = 880 |
| 4144 | AT1G28560.2 Symbols: SRD2: SHOOT REDIFFERENTIATION DEFECTIVE 2. Chr1: 10038197- |
| | 10040382 REVERSE LENGTH = 386 |
| 4145 | AT1G28580.1 Symbols: no symbol available: no full name available. Chr1: 10044603-10046379 |
| | REVERSE LENGTH = 390 |
| 4146 | AT1G28710.1 Symbols: no symbol available: no full name available. Chr1: 10086850-10088025 |
| | REVERSE LENGTH = 340 |
| 4147 | AT1G29120.5 Symbols: UP9: UP9. Chr1: 10174481-10178143 FORWARD LENGTH = 456 |
| 4148 | AT1G29390.1 Symbols: COR314-TM2, COR413IM2: cold regulated 314 thylakoid membrane 2, COLD |
| | REGULATED 314 INNER MEMBRANE 2. Chr1: 10286409-10287878 REVERSE LENGTH = 226 |
| 4149 | AT1G29465.1 Symbols: no symbol available: no full name available. Chr1: 10309626-10309736 |
| | FORWARD LENGTH = 36 |
| 4150 | AT1G29890.2 Symbols: RWA4: REDUCED WALL ACETYLATION 4. Chr1: 10463532-10467153 |
| | FORWARD LENGTH = 584 |
| 4151 | AT1G29950.1 Symbols: no symbol available: no full name available. Chr1: 10493461-10494216 |
| | FORWARD LENGTH = 251 |
| 4152 | AT1G30210.1 Symbols: ATTCP24, TCP24: TEOSINTE BRANCHED 1, cycloidea, and PCF family 24. |
| | Chr1: 10628754-10629728 REVERSE LENGTH = 324 |
| 4153 | AT1G30270.1 Symbols: SnRK3.23, PKS17, CIPK23, ATCIPK23, LKS1: SOS2-like protein kinase |
| | 17, LOW-K+-SENSITIVE 1, CBL-interacting protein kinase 23, SNF1-RELATED PROTEIN KINASE |
| | 3.23. Chr1: 10655270-10658524 FORWARD LENGTH = 482 |
| 4154 | AT1G30330.2 Symbols: ARF6: auxin response factor 6. Chr1: 10686125-10690036 REVERSE |
| | LENGTH = 935 |
| 4155 | AT1G30650.1 Symbols: AR411, WRKY14, ATWRKY14: WRKY DNA-BINDING PROTEIN 14, WRKY |
| | DNA-binding protein 14. Chr1: 10868612-10870973 FORWARD LENGTH = 430 |
| 4156 | AT1G30820.1 Symbols: no symbol available: no full name available. Chr1: 10945251-10948825 |
| | REVERSE LENGTH = 600 |
| 4157 | AT1G31300.1 Symbols: no symbol available: no full name available. Chr1: 11194308-11195955 |
| | FORWARD LENGTH = 278 |
| 4158 | AT1G31460.1 Symbols: no symbol available: no full name available. Chr1: 11261705-11262610 |
| | REVERSE LENGTH = 301 |
| 4159 | AT1G31600.1 Symbols: TRM9, AtTRM9: tRNA methyltransferase 9, Arabidopsis thaliana tRNA |
| | methyltransferase 9. Chr1: 11313376-11315199 REVERSE LENGTH = 431 |
| 4160 | AT1G31880.1 Symbols: NLM9, BRX: BREVIS RADIX. Chr1: 11447804-11450053 FORWARD |
| | LENGTH = 344 |
| 4161 | AT1G31910.1 Symbols: no symbol available: no full name available. Chr1: 11459050-11461649 |
| | FORWARD LENGTH = 505 |
| 4162 | AT1G32230.1 Symbols: RIMB1, ATP8, RCD1, CEO, CEO1, AtRCD1: RADICAL-INDUCED CELL |
| | DEATH1, ARABIDOPSIS THALIANA P8 (INTERACTING PROTEIN), REDOX IMBALANCED 1. |
| | Chr1: 11613427-11615894 FORWARD LENGTH = 589 |
| 4163 | AT1G32540.1 Symbols: LOL1: lsd one like 1. Chr1: 11768253-11769591 FORWARD LENGTH = 187 |
| 4164 | AT1G32750.1 Symbols: GTD1, HAF01, HAF1, HAC13, TAF1: TBP-ASSOCIATED FACTOR |
| | 1, HISTONE ACETYLTRANSFERASE OF THE CBP FAMILY 13, HISTONE |
| | ACETYLTRANSFERASE OF THE TAFII250 FAMILY 1. Chr1: 11846385-11856261 REVERSE |
| | LENGTH = 1919 |
| 4165 | AT1G32780.1 Symbols: no symbol available: no full name available. Chr1: 11869977-11872595 |
| | REVERSE LENGTH = 394 |
| 4166 | AT1G34190.1 Symbols: anac017, NAC017, RAO2: NAC domain containing protein 17, regulators of |
| | aoxla 2. Chr1: 12451729-12453914 FORWARD LENGTH = 557 |
| 4167 | AT1G35340.1 Symbols: no symbol available: no full name available. Chr1: 12977768-12979749 |
| | FORWARD LENGTH = 316 |
| 4168 | AT1G43690.1 Symbols: no symbol available: no full name available. Chr1: 16478519-16482589 |
| | FORWARD LENGTH = 599 |
| 4169 | AT1G44750.1 Symbols: PUP11, ATPUP11: purine permease 11. Chr1: 16892688-16895168 FORWARD |
| | LENGTH = 379 |
| 4170 | AT1G44890.1 Symbols: no symbol available: no full name available. Chr1: 16963358-16964818 |
| | FORWARD LENGTH = 281 |
| 4171 | AT1G47740.1 Symbols: no symbol available: no full name available. Chr1: 17567903-17569035 |
| | FORWARD LENGTH = 279 |
| 4172 | AT1G48140.1 Symbols: DPMS3: dolichol phosphate mannose synthase 3. Chr1: 17783402-17783914 |
| | FORWARD LENGTH = 89 |
| 4173 | AT1G48330.1 Symbols: no symbol available: no full name available. Chr1: 17863897-17864124 |
| | FORWARD LENGTH = 75 |
| 4174 | AT1G48635.2 Symbols: PEX3-2, PEX3: PEROXIN 3-2, peroxin 3. Chr1: 17983951-17985966 |
| | FORWARD LENGTH = 400 |
| 4175 | AT1G49000.1 Symbols: no symbol available: no full name available. Chr1: 18123559-18124029 |
| | REVERSE LENGTH = 156 |
| 4176 | AT1G49130.1 Symbols: BBX17: B-box domain protein 17. Chr1: 18174741-18175936 REVERSE |
| | LENGTH = 326 |
| 4177 | AT1G50360.1 Symbols: ATVIIIA, VIIIA: MYOSIN VIII A. Chr1: 18650688-18657106 FORWARD |
| | LENGTH = 1153 |
| 4178 | AT1G50440.1 Symbols: no symbol available: no full name available. Chr1: 18686099-18687646 |
| | FORWARD LENGTH = 250 |
| 4179 | AT1G50460.1 Symbols: HKL1, ATHKL1: hexokinase-like 1. Chr1: 18694031-18697429 FORWARD |
| | LENGTH = 498 |
| 4180 | AT1G51745.1 Symbols: SL1.: Chr1: 19192055-19194479 FORWARD LENGTH = 635 |
| 4181 | AT1G52080.1 Symbols: AR791.: Chr1: 19369788-19371862 FORWARD LENGTH = 573 |
| 4182 | AT1G52100.1 Symbols: no symbol available: no full name available. Chr1: 19383291-19385123 |
| | REVERSE LENGTH = 437 |
| 4183 | AT1G52150.2 Symbols: ATHB15, CNA, ICU4, ATHB-15: INCURVATA 4, CORONA. Chr1: 19409913- |
| | 19413961 REVERSE LENGTH = 837 |
| 4184 | AT1G52370.1 Symbols: no symbol available: no full name available. Chr1: 19507052-19508699 |
| | FORWARD LENGTH = 269 |
| 4185 | AT1G52630.1 Symbols: no symbol available: no full name available. Chr1: 19606470-19608526 |
| | REVERSE LENGTH = 439 |
| 4186 | AT1G53035.1 Symbols: no symbol available: no full name available. Chr1: 19761866-19762318 |
| | REVERSE LENGTH = 150 |
| 4187 | AT1G53110.1 Symbols: no symbol available: no full name available. Chr1: 19790434-19792016 |
| | FORWARD LENGTH = 439 |
| 4188 | AT1G53200.1 Symbols: no symbol available: no full name available. Chrl: 19840486-19843169 |
| | REVERSE LENGTH = 613 |
| 4189 | AT1G53300.1 Symbols: TTL1: tetratricopeptide-repeat thioredoxin-like 1. Chr1: 19879726-19882375 |
| | FORWARD LENGTH = 699 |
| 4190 | AT1G53430.1 Symbols: no symbol available: no full name available. Chr1: 19935298-19940959 |
| | FORWARD LENGTH = 1038 |
| 4191 | AT1G53490.1 Symbols: HEI10; homolog of human HEI10 ( Enhancer of cell Invasion No. 10). |
| | Chr1: 19965146-19966811 FORWARD LENGTH = 304 |
| 4192 | AT1G53650.1 Symbols: CID8: CTC-interacting domain 8. Chr1: 20029262-20031243 REVERSE |
| | LENGTH = 314 |
| 4193 | AT1G53780.2 Symbols: no symbol available: no full name available. Chr1: 20074212-20077713 |
| | REVERSE LENGTH = 620 |
| 4194 | AT1G54180.1 Symbols: BRX-LIKE3, ATBRXL3: BREVIS RADIX-like 3, ARABIDOPSIS THALIANA |
| | BREVIS RADIX-LIKE 3. Chr1: 20227697-20229728 FORWARD LENGTH = 370 |
| 4195 | AT1G54360.2 Symbols: TAF6B, TAF6B1, TAF6B2, TAF6B4: TBP-ASSOCIATED FACTOR 6B2, TBP- |
| | ASSOCIATED FACTOR 6B1, TBP-ASSOCIATED FACTOR 6B, TBP-associated factor 6B4. |
| | Chr1: 20290600-20293160 FORWARD LENGTH = 527 |
| 4196 | AT1G54390.2 Symbols: ING2: INHIBITOR OF GROWTH 2. Chr1: 20304833-20306943 REVERSE |
| | LENGTH = 328 |
| 4197 | AT1G54410.1 Symbols: HIRD11, AtHIRD11: dehydrin 11 kDa. Chr1: 20310305-20310601 REVERSE |
| | LENGTH = 98 |
| 4198 | AT1G55120.1 Symbols: FRUCT5, AtcwINV3, ATFRUCT5: beta-fructofuranosidase 5,6-fructan |
| | exohydrolase. Chr1: 20566617-20569165 FORWARD LENGTH = 594 |
| 4199 | AT1G55350.5 Symbols: EMB80, EMB1275, ATDEK1, DEK1: EMBRYO DEFECTIVE 80, DEFECTIVE |
| | KERNEL 1, embryo defective 1275. Chr1: 20654463-20664501 REVERSE LENGTH = 2179 |
| 4200 | AT1G55500.2 Symbols: ECT4: evolutionarily conserved C-terminal region 4. Chr1: 20719747-20722416 |
| | FORWARD LENGTH = 599 |
| 4201 | AT1G55580.1 Symbols: SCL18, LAS: Lateral Suppressor, SCARECROW-LIKE 18. Chr1: 20764106- |
| | 20765443 FORWARD LENGTH = 445 |
| 4202 | AT1G55610.1 Symbols: BRL1: BRI1 like. Chr1: 20779874-20783374 REVERSE LENGTH = 1166 |
| 4203 | AT1G55630.1 Symbols: no symbol available: no full name available. Chr1: 20791817-20793250 |
| | REVERSE LENGTH = 477 |
| 4204 | AT1G55675.1 Symbols: no symbol available: no full name available. Chr1: 20803854-20804180 |
| | REVERSE LENGTH = 108 |
| 4205 | AT1G55680.1 Symbols: no symbol available: no full name available. Chr1: 20804988-20807294 |
| | REVERSE LENGTH = 445 |
| 4206 | AT1G55760.1 Symbols: no symbol available: no full name available. Chr1: 20847117-20848507 |
| | REVERSE LENGTH = 329 |
| 4207 | AT1G56045.1 Symbols: no symbol available: no full name available. Chr1: 20962686-20963268 |
| | FORWARD LENGTH = 25 |
| 4208 | AT1G57610.1 Symbols: no symbol available: no full name available. Chr1: 21337449-21338412 |
| | REVERSE LENGTH = 293 |
| 4209 | AT1G57700.1 Symbols: no symbol available: no full name available. Chr1: 21371051-21373860 |
| | FORWARD LENGTH = 692 |
| 4210 | AT1G58180.2 Symbols: BCA6, ATBCA6: A. THALIANA BETA CARBONIC ANHYDRASE 6, beta |
| | carbonic anhydrase 6. Chr1: 21538010-21539711 REVERSE LENGTH = 290 |
| 4211 | AT1G58200.1 Symbols: MSL3: MSCS-like 3. Chr1: 21548370-21552488 REVERSE LENGTH = 678 |
| 4212 | AT1G58250.2 Symbols: HPS4, SAB: hypersensitive to Pi starvation 4, SABRE. Chr1: 21587317- |
| | 21601373 REVERSE LENGTH = 2655 |
| 4213 | AT1G58350.1 Symbols: ZW18.: Chr1: 21663131-21666827 REVERSE LENGTH = 794 |
| 4214 | AT1G58602.1 Symbols: no symbol available: no full name available. Chr1: 21760167-21763765 |
| | FORWARD LENGTH = 1138 |
| 4215 | AT1G60440.1 Symbols: PANK1, ATPANK1, ATCOAA: pantothenate kinase 1. Chr1: 22266653- |
| | 22269070 REVERSE LENGTH = 383 |
| 4216 | AT1G60850.2 Symbols: AAC42, ATRPAC42.: Chr1: 22398078-22400155 REVERSE LENGTH = 375 |
| 4217 | AT1G60890.2 Symbols: no symbol available: no full name available. Chr1: 22412452-22416498 |
| | REVERSE LENGTH = 781 |
| 4218 | AT1G61150.1 Symbols: no symbol available: no full name available. Chr1: 22542928-22544355 |
| | FORWARD LENGTH = 243 |
| 4219 | AT1G61410.1 Symbols: no symbol available: no full name available. Chr1: 22658708-22659064 |
| | REVERSE LENGTH = 118 |
| 4220 | AT1G61520.1 Symbols: LHCA3: photosystem I light harvesting complex gene 3. Chr1: 22700152- |
| | 22701149 FORWARD LENGTH = 273 |
| 4221 | AT1G61820.1 Symbols: BGLU46: beta glucosidase 46. Chr1: 22835452-22838444 FORWARD |
| | LENGTH = 516 |
| 4222 | AT1G62305.1 Symbols: no symbol available: no full name available. Chr1: 23026989-23029189 |
| | REVERSE LENGTH = 378 |
| 4223 | AT1G62540.1 Symbols: FMO GS-OX2: flavin-monooxygenase glucosinolate S-oxygenase 2. |
| | Chr1: 23151870-23155427 FORWARD LENGTH = 457 |
| 4224 | AT1G62610.4 Symbols: no symbol available: no full name available. Chr1: 23181531-23182454 |
| | REVERSE LENGTH = 282 |
| 4225 | AT1G62840.1 Symbols: no symbol available: no full name available. Chr1: 23271481-23272407 |
| | FORWARD LENGTH = 224 |
| 4226 | AT1G63010.5 Symbols: VPT1, PHT5_1: Vacuolar Phosphate Transporter 1. Chr1: 23347972-23351026 |
| | REVERSE LENGTH = 708 |
| 4227 | AT1G63480.1 Symbols: AHL12: AT-hook motif nuclear localized protein 12. Chr1: 23539872-23541685 |
| | REVERSE LENGTH = 361 |
| 4228 | AT1G63670.1 Symbols: TRM12: TON1 Recruiting Motif 12. Chr1: 23607527-23610003 REVERSE |
| | LENGTH = 689 |
| 4229 | AT1G64110.2 Symbols: DAA1: DUO1-activated ATPase 1. Chr1: 23796887-23801255 REVERSE |
| | LENGTH = 829 |
| 4230 | AT1G64140.1 Symbols: no symbol available: no full name available. Chr1: 23804069-23806009 |
| | REVERSE LENGTH = 646 |
| 4231 | AT1G64230.4 Symbols: UBC28: ubiquitin-conjugating enzyme 28. Chr1: 23833792-23835220 |
| | FORWARD LENGTH = 190 |
| 4232 | AT1G64630.1 Symbols: WNK10, ATWNK10: with no lysine (K) kinase 10, WITH NO LYSINE KINASE |
| | 10. Chr1: 24019920-24022114 FORWARD LENGTH = 524 |
| 4233 | AT1G64990.1 Symbols: GTG1: GPCR-type G protein 1. Chr1: 24140183-24145866 REVERSE |
| | LENGTH = 468 |
| 4234 | AT1G65070.2 Symbols: no symbol available: no full name available. Chr1: 24173047-24176244 |
| | REVERSE LENGTH = 876 |
| 4235 | AT1G65840.1 Symbols: PAO4, ATPAO4: polyamine oxidase 4. Chr1: 24490173-24492728 FORWARD |
| | LENGTH = 497 |
| 4236 | AT1G66660.2 Symbols: no symbol available: no full name available. Chr1: 24862056-24863332 |
| | REVERSE LENGTH = 348 |
| 4237 | AT1G67325.2 Symbols: no symbol available: no full name available. Chr1: 25209825-25212412 |
| | REVERSE LENGTH = 288 |
| 4238 | AT1G67480.1 Symbols: no symbol available: no full name available. Chr1: 25277294-25278529 |
| | FORWARD LENGTH = 376 |
| 4239 | AT1G67570.1 Symbols: no symbol available: no full name available. Chr1: 25325318-25326938 |
| | FORWARD LENGTH = 456 |
| 4240 | AT1G67800.2 Symbols: no symbol available: no full name available. Chr1: 25421029-25423297 |
| | REVERSE LENGTH = 453 |
| 4241 | AT1G67900.1 Symbols: no symbol available: no full name available. Chr1: 25467737-25469888 |
| | FORWARD LENGTH = 631 |
| 4242 | AT1G68130.1 Symbols: IDD14alpha, ALIDD14, IDD14beta, IDD14: indeterminate(ID)-domain 14. |
| | Chr1: 25532484-25534317 FORWARD LENGTH = 419 |
| 4243 | AT1G68160.1 Symbols: no symbol available: no full name available. Chr1: 25546168-25548625 |
| | REVERSE LENGTH = 273 |
| 4244 | AT1G68410.1 Symbols: no symbol available: no full name available. Chr1: 25650262-25652255 |
| | REVERSE LENGTH = 436 |
| 4245 | AT1G68550.1 Symbols: CRF10: cytokinin response factor 10. Chr1: 25725810-25726784 REVERSE |
| | LENGTH = 324 |
| 4246 | AT1G68920.1 Symbols: bHLH49, CIL1: CIB1 Like protein 1. Chr1: 25915620-25917675 FORWARD |
| | LENGTH = 486 |
| 4247 | AT1G69170.1 Symbols: AtSPL6, SPL6: SQUAMOSA PROMOTER BINDING PROTEIN (SBP)-domain |
| | transcription factor 6. Chr1: 26005626-26007041 FORWARD LENGTH = 405 |
| 4248 | AT1G69690.1 Symbols: AtTCP15, TCP15: TEOSINTE BRANCHED1/CYCLOIDEA/PCF 15. |
| | Chr1: 26216449-26217426 FORWARD LENGTH = 325 |
| 4249 | AT1G69750.1 Symbols: ATCOX19-2, COX19-2: cytochrome c oxidase 19-2, A. THALIANA |
| | CYTOCHROME C OXIDASE 19-2. Chr1: 26236352-26237316 FORWARD LENGTH = 98 |
| 4250 | AT1G69840.1 Symbols: no symbol available: no full name available. Chr1: 26293932-26295150 |
| | REVERSE LENGTH = 286 |
| 4251 | AT1G69870.1 Symbols: NRT1.7, AtNPF2.13, NPF2.13: nitrate transporter 1.7, NRT1/PTR family 2.13. |
| | Chr1: 26316208-26320097 FORWARD LENGTH = 620 |
| 4252 | AT1G70160.1 Symbols: no symbol available: no full name available. Chr1: 26420159-26422345 |
| | FORWARD LENGTH = 523 |
| 4253 | AT1G70280.2 Symbols: no symbol available: no full name available. Chr1: 26466086-26468471 |
| | REVERSE LENGTH = 509 |
| 4254 | AT1G70340.1 Symbols: no symbol available: no full name available. Chr1: 26504567-26506389 |
| | REVERSE LENGTH = 510 |
| 4255 | AT1G70670.1 Symbols: CLO4, AtCLO4, PXG4: peroxygenase 4, Arabidopsis thaliana caleosin 4, caleosin |
| | 4. Chr1: 26644830-26645970 FORWARD LENGTH = 195 |
| 4256 | AT1G70780.1 Symbols: no symbol available: no full name available. Chr1: 26695462-26695975 |
| | REVERSE LENGTH = 140 |
| 4257 | AT1G71020.1 Symbols: PUB10: PLANT U-BOX PROTEIN10. Chr1: 26790825-26793105 REVERSE |
| | LENGTH = 628 |
| 4258 | AT1G71340.1 Symbols: AtGDPD4, GDPD4: glycerophosphodiester phosphodiesterase 4. |
| | Chr1: 26885556-26887321 REVERSE LENGTH = 328 |
| 4259 | AT1G71696.2 Symbols: SOL1: SUPPRESSOR OF LLP1 1. Chr1: 26966996-26970364 FORWARD |
| | LENGTH = 491 |
| 4260 | AT1G71940.2 Symbols: no symbol available: no full name available. Chr1: 27078781-27080191 |
| | FORWARD LENGTH = 306 |
| 4261 | AT1G71980.1 Symbols: no symbol available: no full name available. Chr1: 27098250-27099881 |
| | FORWARD LENGTH = 448 |
| 4262 | AT1G72130.1 Symbols: no symbol available: no full name available. Chr1: 27137201-27139223 |
| | FORWARD LENGTH = 538 |
| 4263 | AT1G72510.1 Symbols: no symbol available: no full name available. Chr1: 27303906-27304403 |
| | FORWARD LENGTH = 165 |
| 4264 | AT1G72770.1 Symbols: HAB1, AtHAB1: HYPERSENSITIVE TO ABA1. Chr1: 27390998-27392851 |
| | FORWARD LENGTH = 511 |
| 4265 | AT1G72820.1 Symbols: no symbol available: no full name available. Chr1: 27403457-27404506 |
| | FORWARD LENGTH = 349 |
| 4266 | AT1G72830.2 Symbols: ATHAP2C, NF-YA3, HAP2C: “nuclear factor Y, subunit A3”. Chr1: 27405699- |
| | 27407088 REVERSE LENGTH = 341 |
| 4267 | AT1G72990.1 Symbols: BGAL17: beta-galactosidase 17. Chr1: 27457480-27462168 REVERSE |
| | LENGTH = 697 |
| 4268 | AT1G73360.1 Symbols: EDT1, ATHDG11, HDG11, AtEDT1: homeodomain GLABROUS |
| | 11, HOMEODOMAIN GLABROUS 11, ENHANCED DROUGHT TOLERANCE 1. Chr1: 27578893- |
| | 27581820 REVERSE LENGTH = 722 |
| 4269 | AT1G73370.1 Symbols: ATSUS6, SUS6: ARABIDOPSIS THALIANA SUCROSE SYNTHASE |
| | 6, sucrose synthase 6. Chr1: 27584533-27588326 REVERSE LENGTH = 942 |
| 4270 | AT1G73470.3 Symbols: no symbol available: no full name available. Chr1: 27625208-27627604 |
| | FORWARD LENGTH = 357 |
| 4271 | AT1G73480.1 Symbols: MAGL4.: Chr1: 27629266-27632486 FORWARD LENGTH = 463 |
| 4272 | AT1G74160.1 Symbols: TRM4: TONI Recruiting Motif 4. Chr1: 27887164-27891151 FORWARD |
| | LENGTH = 1025 |
| 4273 | AT1G74370.1 Symbols: no symbol available: no full name available. Chr1: 27958200-27958985 |
| | REVERSE LENGTH = 261 |
| 4274 | AT1G74650.1 Symbols: ATY13, MYB31, ATMYB31: ARABIDOPSIS THALIANA MYB DOMAIN |
| | PROTEIN 31, myb domain protein 31. Chr1: 28041493-28042773 FORWARD LENGTH = 330 |
| 4275 | AT1G74680.1 Symbols: no symbol available: no full name available. Chr1: 28059528-28060984 |
| | FORWARD LENGTH = 461 |
| 4276 | AT1G74910.1 Symbols: KJC1: KONJAC 1. Chr1: 28135770-28138456 REVERSE LENGTH = 415 |
| 4277 | AT1G75190.1 Symbols: no symbol available: no full name available. Chr1: 28219598-28219993 |
| | FORWARD LENGTH = 131 |
| 4278 | AT1G75240.1 Symbols: HB33, AtHB33, ZHD5: zinc-finger homeodomain 5, homeobox protein 33. |
| | Chr1: 28241576-28242505 FORWARD LENGTH = 309 |
| 4279 | AT1G75300.1 Symbols: no symbol available: no full name available. Chr1: 28255552-28256927 |
| | FORWARD LENGTH = 322 |
| 4280 | AT1G75340.1 Symbols: no symbol available: no full name available. Chr1: 28269153-28271873 |
| | REVERSE LENGTH = 435 |
| 4281 | AT1G75390.1 Symbols: bZIP44, AtbZIP44: basic leucine-zipper 44. Chr1: 28292224-28292745 |
| | FORWARD LENGTH = 173 |
| 4282 | AT1G75450.1 Symbols: ATCKX6, ATCKX5, CKX5: ARABIDOPSIS THALIANA CYTOKININ |
| | OXIDASE 5, CYTOKININ OXIDASE 6, cytokinin oxidase 5. Chr1: 28315248-28318064 REVERSE |
| | LENGTH = 540 |
| 4283 | AT1G75600.1 Symbols: HTR14.: Chr1: 28390753-28391461 FORWARD LENGTH = 136 |
| 4284 | AT1G75730.1 Symbols: no symbol available: no full name available. Chr1: 28435991-28438983 |
| | REVERSE LENGTH = 589 |
| 4285 | AT1G76200.1 Symbols: no symbol available: no full name available. Chr1: 28593351-28593980 |
| | FORWARD LENGTH = 69 |
| 4286 | AT1G76710.1 Symbols: ASHH1, SDG26: SET domain group 26, ASH1-RELATED PROTEIN 1. |
| | Chr1: 28789887-28792371 REVERSE LENGTH = 492 |
| 4287 | AT1G76720.1 Symbols: no symbol available: no full name available. Chr1: 28794144-28798780 |
| | REVERSE LENGTH = 1191 |
| 4288 | AT1G77350.1 Symbols: no symbol available: no full name available. Chr1: 29070497-29071545 |
| | FORWARD LENGTH = 122 |
| 4289 | AT1G77460.1 Symbols: CSI3: CELLULOSE SYNTHASE INTERACTIVE 3. Chr1: 29104378- |
| | 29111580 FORWARD LENGTH = 2136 |
| 4290 | AT1G77580.2 Symbols: no symbol available: no full name available. Chr1: 29144191-29146793 |
| | REVERSE LENGTH = 779 |
| 4291 | AT1G77660.1 Symbols: no symbol available: no full name available. Chr1: 29186073-29187500 |
| | REVERSE LENGTH = 421 |
| 4292 | AT1G77680.1 Symbols: RRP44B, AtRRP44B, SOV: Rrp44 homolog B, SUPPRESSOR OF VARICOSE. |
| | Chr1: 29192188-29195963 REVERSE LENGTH = 1055 |
| 4293 | AT1G78080.1 Symbols: AtWIND1, WIND1, RAP2.4: wound induced dedifferentiation 1, related to AP2 4. |
| | Chr1: 29364790-29365794 FORWARD LENGTH = 334 |
| 4294 | AT1G78260.1 Symbols: no symbol available: no full name available. Chr1: 29447317-29450181 |
| | FORWARD LENGTH = 287 |
| 4295 | AT1G78700.1 Symbols: BEH4: BES1/BZR1 homolog 4. Chr1: 29599854-29601539 FORWARD |
| | LENGTH = 325 |
| 4296 | AT1G78710.1 Symbols: TBL42: TRICHOME BIREFRINGENCE-LIKE 42. Chr1: 29602708-29604557 |
| | FORWARD LENGTH = 359 |
| 4297 | AT1G78880.1 Symbols: no symbol available: no full name available. Chr1: 29653068-29654819 |
| | REVERSE LENGTH = 468 |
| 4298 | AT1G79220.1 Symbols: no symbol available: no full name available. Chr1: 29799227-29800426 |
| | FORWARD LENGTH = 399 |
| 4299 | AT1G79230.1 Symbols: ATMST1, STR1, MST1, ATRDHI, STI: ARABIDOPSIS THALIANA |
| | RHODANESE HOMOLOGUE 1, mercaptopyruvate sulfurtransferase 1, SULFURTRANSFERASE 1. |
| | Chr1: 29800824-29803679 FORWARD LENGTH = 379 |
| 4300 | AT1G79490.1 Symbols: EMB2217: embryo defective 2217. Chr1: 29900617-29903127 FORWARD |
| | LENGTH = 836 |
| 4301 | AT1G79690.1 Symbols: atnudt3, NUDT3: nudix hydrolase homolog 3. Chr1: 29985360-29990171 |
| | FORWARD LENGTH = 772 |
| 4302 | AT1G79790.1 Symbols: FHY1, AtcpFHy1: Arabidopsis thaliana chloroplast FMN hydrolase 1, flavin |
| | mononucleotide hydrolase 1. Chr1: 30016987-30018186 REVERSE LENGTH = 245 |
| 4303 | AT1G79810.1 Symbols: TED3, PEX2, ATPEX2: ARABIDOPSIS PEROXIN 2, PEROXIN 2, REVERSAL |
| | OF THE DET PHENOTYPE 3. Chr1: 30019944-30022156 FORWARD LENGTH = 333 |
| 4304 | AT1G80280.1 Symbols: no symbol available: no full name available. Chr1: 30183839-30186141 |
| | REVERSE LENGTH = 647 |
| 4305 | AT1G80420.1 Symbols: XRCC1, ATXRCC1: homolog of X-ray repair cross complementing 1. |
| | Chr1: 30235444-30237163 REVERSE LENGTH = 353 |
| 4306 | AT1G80570.2 Symbols: no symbol available: no full name available. Chr1: 30290661-30292231 |
| | FORWARD LENGTH = 480 |
| 4307 | AT1G80640.1 Symbols: no symbol available: no full name available. Chr1: 30311979-30314238 |
| | FORWARD LENGTH = 427 |
| 4308 | AT1G80780.3 Symbols: no symbol available: no full name available. Chr1: 30358517-30359583 |
| | FORWARD LENGTH = 286 |
| 4309 | AT1G80980.1 Symbols: no symbol available: no full name available. Chr1: 30422184-30423440 |
| | REVERSE LENGTH = 214 |
| 4310 | AT2G01100.1 Symbols: no symbol available: no full name available. Chr2: 82245-82988 FORWARD |
| | LENGTH = 247 |
| 4311 | AT2G01175.1 Symbols: no symbol available: no full name available. Chr2: 105572-105760 REVERSE |
| | LENGTH = 62 |
| 4312 | AT2G01350.1 Symbols: QPT: quinolinate phoshoribosyltransferase. Chr2: 165332-167209 REVERSE |
| | LENGTH = 348 |
| 4313 | AT2G01690.2 Symbols: no symbol available: no full name available. Chr2: 309144-313499 REVERSE LENGTH = 744 |
| 4314 | AT2G01730.1 Symbols: ATCPSF73-II, EDA26, CPSF73-II: cleavage and polyadenylation specificity |
| | factor 73 kDa subunit-II, embryo sac development arrest 26. Chr2: 320597-323845 FORWARD |
| | LENGTH = 613 |
| 4315 | AT2G01930.1 Symbols: ATBPC1, BBR, BPC1: BASIC PENTACYSTEINE1, basic pentacysteine1. |
| | Chr2: 427358-428209 REVERSE LENGTH = 283 |
| 4316 | AT2G02710.1 Symbols: PLPA, PLPB, PLPC, PLP: PAS/LOV protein B, PAS/LOV PROTEIN |
| | C, PAS/LOV PROTEIN A, PAS/LOV PROTEIN. Chr2: 758812-760608 REVERSE LENGTH = 399 |
| 4317 | AT2G02870.1 Symbols: no symbol available: no full name available. Chr2: 838378-839781 FORWARD |
| | LENGTH = 467 |
| 4318 | AT2G02930.1 Symbols: ATGSTF3, GST16, GSTF3: GLUTATHIONE S-TRANSFERASE 16, glutathione |
| | S-transferase F3. Chr2: 851348-852106 REVERSE LENGTH = 212 |
| 4319 | AT2G02960.5 Symbols: no symbol available: no full name available. Chr2: 862440-863980 REVERSE |
| | LENGTH = 275 |
| 4320 | AT2G02970.1 Symbols: APY6, AtAPY6: apyrase 6. Chr2: 865395-868007 REVERSE LENGTH = 555 |
| 4321 | AT2G03070.1 Symbols: MED8: mediator subunit 8. Chr2: 905978-908792 FORWARD LENGTH = 524 |
| 4322 | AT2G03340.1 Symbols: WRKY3: WRKY DNA-binding protein 3. Chr2: 1014724-1016936 REVERSE |
| | LENGTH = 513 |
| 4323 | AT2G03530.1 Symbols: UPS2, ATUPS2: ureide permease 2, ARABIDOPSIS THALIANA UREIDE |
| | PERMEASE 2. Chr2: 1071951-1073522 FORWARD LENGTH = 398 |
| 4324 | AT2G03810.1 Symbols: no symbol available: no full name available. Chr2: 1162703-1164286 |
| | FORWARD LENGTH = 439 |
| 4325 | AT2G03890.1 Symbols: UBDK GAMMA 7, ATPI4K GAMMA 7, PI4K GAMMA 7: UBIQUITIN-LIKE |
| | DOMAIN KINASE GAMMA 7, phosphoinositide 4-kinase gamma 7. Chr2: 1186199-1188151 |
| | FORWARD LENGTH = 650 |
| 4326 | AT2G04039.3 Symbols: no symbol available: no full name available. Chr2: 1333464-1334457 |
| | FORWARD LENGTH = 206 |
| 4327 | AT2G04240.1 Symbols: XERICO.: Chr2: 1461816-1462304 REVERSE LENGTH = 162 |
| 4328 | AT2G04378.2 Symbols: no symbol available: no full name available. Chr2: 1525640-1526169 |
| | REVERSE LENGTH = 146 |
| 4329 | AT2G04890.1 Symbols: SCL21: SCARECROW-like 21. Chr2: 1720575-1721816 REVERSE |
| | LENGTH = 413 |
| 4330 | AT2G05160.1 Symbols: no symbol available: no full name available. Chr2: 1859011-1860931 |
| | REVERSE LENGTH = 536 |
| 4331 | AT2G05210.1 Symbols: AtPOT1a, ATPOT1: Protection of Telomeres 1a. Chr2: 1891814-1894196 |
| | FORWARD LENGTH = 467 |
| 4332 | AT2G05630.2 Symbols: ATG8D.: Chr2: 2083211-2084775 REVERSE LENGTH = 164 |
| 4333 | AT2G05632.1 Symbols: no symbol available: no full name available. Chr2: 2087744-2087902 |
| | REVERSE LENGTH = 52 |
| 4334 | AT2G07727.1 Symbols: no symbol available: no full name available. Chr2: 3450863-3452044 |
| | FORWARD LENGTH = 393 |
| 4335 | AT2G12200.1 Symbols: no symbol available: no full name available. Chr2: 4900651-4900944 |
| | FORWARD LENGTH = 63 |
| 4336 | AT2G12280.1 Symbols: no symbol available: no full name available. Chr2: 4922324-4922596 |
| | FORWARD LENGTH = 90 |
| 4337 | AT2G13660.1 Symbols: no symbol available: no full name available. Chr2: 5692292-5692889 |
| | REVERSE LENGTH = 177 |
| 4338 | AT2G15530.4 Symbols: MBR1: MED25 BINDING RING-H2 PROTEIN 1. Chr2: 6774150-6777899 |
| | FORWARD LENGTH = 780 |
| 4339 | AT2G16400.1 Symbols: BLH7: BEL1-like homeodomain 7. Chr2: 7101490-7103200 REVERSE |
| | LENGTH = 482 |
| 4340 | AT2G16430.2 Symbols: ATPAP10, PAP10: purple acid phosphatase 10. Chr2: 7120502-7122772 |
| | REVERSE LENGTH = 468 |
| 4341 | AT2G16586.1 Symbols: no symbol available: no full name available. Chr2: 7191649-7191810 |
| | FORWARD LENGTH = 53 |
| 4342 | AT2G16900.1 Symbols: no symbol available: no full name available. Chr2: 7323857-7325374 |
| | REVERSE LENGTH = 382 |
| 4343 | AT2G17370.1 Symbols: HMGR2, HMG2: 3-hydroxy-3-methylglutaryl-CoA reductase 2,3-HYDROXY- |
| | 3-METHYLGLUTARYL-COENZYME A REDUCTASE 2. Chr2: 7550007-7551981 FORWARD |
| | LENGTH = 562 |
| 4344 | AT2G17440.1 Symbols: PIRL5: plant intracellular ras group-related LRR 5. Chr2: 7571331-7573406 |
| | FORWARD LENGTH = 526 |
| 4345 | AT2G17480.1 Symbols: MLO8, ATMLO8: MILDEW RESISTANCE LOCUS O 8. Chr2: 7590559- |
| | 7593768 REVERSE LENGTH = 593 |
| 4346 | AT2G17540.2 Symbols: no symbol available: no full name available. Chr2: 7630662-7631489 |
| | REVERSE LENGTH = 275 |
| 4347 | AT2G17550.1 Symbols: TRM26: TON1 Recruiting Motif 26. Chr2: 7634495-7637212 REVERSE |
| | LENGTH = 779 |
| 4348 | AT2G18150.1 Symbols: no symbol available: no full name available. Chr2: 7892298-7893586 |
| | REVERSE LENGTH = 338 |
| 4349 | AT2G18160.1 Symbols: GBF5, ATBZIP2, bZIP2, FTM3: FLORAL TRANSITION AT THE |
| | MERISTEM3, G-BOX BINDING FACTOR 5, basic leucine-zipper 2. Chr2: 7898288-7898803 REVERSE |
| | LENGTH = 171 |
| 4350 | AT2G18876.1 Symbols: no symbol available: no full name available. Chr2: 8169683-8172287 |
| | FORWARD LENGTH = 382 |
| 4351 | AT2G18970.1 Symbols: no symbol available: no full name available. Chr2: 8229373-8229670 |
| | FORWARD LENGTH = 62 |
| 4352 | AT2G19170.1 Symbols: SLP3: subtilisin-like serine protease 3. Chr2: 8314154-8317620 REVERSE |
| | LENGTH = 815 |
| 4353 | AT2G19390.1 Symbols: no symbol available: no full name available. Chr2: 8390136-8396477 |
| | REVERSE LENGTH = 1211 |
| 4354 | AT2G19470.1 Symbols: ckl5: casein kinase I-like 5. Chr2: 8433851-8436295 REVERSE LENGTH = 433 |
| 4355 | AT2G19490.1 Symbols: RECA2: A. thaliana recA homolog 2. Chr2: 8441732-8444006 FORWARD |
| | LENGTH = 430 |
| 4356 | AT2G19880.2 Symbols: GCS: GlcCer synthase. Chr2: 8581578-8585118 FORWARD LENGTH = 520 |
| 4357 | AT2G20010.2 Symbols: no symbol available: no full name available. Chr2: 8637977-8641184 |
| | REVERSE LENGTH = 952 |
| 4358 | AT2G20080.1 Symbols: TIE2: TCP Interactor containing EAR motif protein 2. Chr2: 8663115-8664735 |
| | REVERSE LENGTH = 178 |
| 4359 | AT2G20440.1 Symbols: no symbol available: no full name available. Chr2: 8811034-8813251 |
| | REVERSE LENGTH = 425 |
| 4360 | AT2G20680.1 Symbols: MAN2, AtMAN2, MAN5-2: endo-beta-mannase 2. Chr2: 8921024-8923066 |
| | FORWARD LENGTH = 433 |
| 4361 | AT2G20780.1 Symbols: no symbol available: no full name available. Chr2: 8947496-8949170 |
| | REVERSE LENGTH = 526 |
| 4362 | AT2G20815.1 Symbols: QWRF3: QWRF domain containing 3. Chr2: 8959988-8961917 FORWARD |
| | LENGTH = 482 |
| 4363 | AT2G20830.2 Symbols: no symbol available: no full name available. Chr2: 8968370-8970479 |
| | REVERSE LENGTH = 431 |
| 4364 | AT2G20990.3 Symbols: ATSYTA, SYTI, NTMC2TYPE1.1, NTMC2T1.1, SYTA: SYNAPTOTAGMIN |
| | 1, synaptotagmin A, ARABIDOPSIS THALIANA SYNAPTOTAGMIN A. Chr2: 9014827-9017829 |
| | FORWARD LENGTH = 579 |
| 4365 | AT2G21300.1 Symbols: no symbol available: no full name available. Chr2: 9114396-9118292 |
| | REVERSE LENGTH = 862 |
| 4366 | AT2G21520.2 Symbols: no symbol available: no full name available. Chr2: 9215956-9218953 |
| | FORWARD LENGTH = 637 |
| 4367 | AT2G21940.4 Symbols: SKI, ATSKI: shikimate kinase 1. Chr2: 9351106-9352881 FORWARD |
| | LENGTH = 304 |
| 4368 | AT2G22670.4 Symbols: IAA8: indoleacetic acid-induced protein 8. Chr2: 9636877-9638459 FORWARD |
| | LENGTH = 338 |
| 4369 | AT2G23680.1 Symbols: no symbol available: no full name available. Chr2: 10066242-10067164 |
| | FORWARD LENGTH = 189 |
| 4370 | AT2G23700.1 Symbols: no symbol available: no full name available. Chr2: 10076624-10079849 |
| | REVERSE LENGTH = 707 |
| 4371 | AT2G23985.2 Symbols: no symbol available: no full name available. Chr2: 10205658-10206283 |
| | FORWARD LENGTH = 71 |
| 4372 | AT2G24280.1 Symbols: no symbol available: no full name available. Chr2: 10334622-10336927 |
| | FORWARD LENGTH = 494 |
| 4373 | AT2G24390.1 Symbols: no symbol available: no full name available. Chr2: 10373796-10374654 |
| | FORWARD LENGTH = 152 |
| 4374 | AT2G24530.1 Symbols: no symbol available: no full name available. Chr2: 10422597-10423820 |
| | FORWARD LENGTH = 407 |
| 4375 | AT2G24630.1 Symbols: CSLC08, ATCSLC8, ATCSLC08: CELLULOSE-SYNTHASE LIKE C8. |
| | Chr2: 10471558-10473984 REVERSE LENGTH = 690 |
| 4376 | AT2G24640.1 Symbols: UBP19: ubiquitin-specific protease 19. Chr2: 10475613-10479341 REVERSE |
| | LENGTH-672 |
| 4377 | AT2G24945.1 Symbols: no symbol available: no full name available. Chr2: 10611582-10612214 |
| | FORWARD LENGTH = 210 |
| 4378 | AT2G25190.1 Symbols: no symbol available: no full name available. Chr2: 10734187-10735426 |
| | FORWARD LENGTH = 240 |
| 4379 | AT2G25510.1 Symbols: no symbol available: no full name available. Chr2: 10856772-10857083 |
| | FORWARD LENGTH = 103 |
| 4380 | AT2G25700.1 Symbols: SK3, ASK3: SKP1-like 3. Chr2: 10948914-10949551 REVERSE LENGTH = 163 |
| 4381 | AT2G26430.1 Symbols: RCY1, ATRCY1, MOS12: arginine-rich cyclin 1, modifier of snc1 |
| | 12, ARGININE-RICH CYCLIN 1. Chr2: 11243433-11245504 REVERSE LENGTH = 416 |
| 4382 | AT2G27060.1 Symbols: no symbol available: no full name available. Chr2: 11551288-11554577 |
| | FORWARD LENGTH = 1020 |
| 4383 | AT2G27110.1 Symbols: FRS3: FAR1-related sequence 3. Chr2: 11576969-11580405 REVERSE |
| | LENGTH = 851 |
| 4384 | AT2G27230.1 Symbols: LHW: LONESOME HIGHWAY. Chr2: 11650895-11653840 FORWARD |
| | LENGTH = 650 |
| 4385 | AT2G27340.2 Symbols: no symbol available: no full name available. Chr2: 11697449-11699120 |
| | FORWARD LENGTH = 258 |
| 4386 | AT2G27350.5 Symbols: OTLD1: otubain-like deubiquitinase 1. Chr2: 11699780-11702363 REVERSE |
| | LENGTH = 506 |
| 4387 | AT2G27402.1 Symbols: no symbol available: no full name available. Chr2: 11724031-11724189 |
| | FORWARD LENGTH = 52 |
| 4388 | AT2G27830.1 Symbols: no symbol available: no full name available. Chr2: 11860734-11861306 |
| | FORWARD LENGTH = 190 |
| 4389 | AT2G27950.1 Symbols: no symbol available: no full name available. Chr2: 11899422-11903171 |
| | REVERSE LENGTH = 839 |
| 4390 | AT2G28105.1 Symbols: no symbol available: no full name available. Chr2: 11976764-11977713 |
| | FORWARD LENGTH = 166 |
| 4391 | AT2G28320.1 Symbols: no symbol available: no full name available. Chr2: 12095161-12099424 |
| | FORWARD LENGTH = 737 |
| 4392 | AT2G28380.1 Symbols: DRB2, AtDRB2: dsRNA-binding protein 2. Chr2: 12134098-12135915 |
| | REVERSE LENGTH = 434 |
| 4393 | AT2G28490.1 Symbols: no symbol available: no full name available. Chr2: 12178812-12180983 |
| | REVERSE LENGTH = 511 |
| 4394 | AT2G28550.3 Symbols: TOE1, RAP2.7: TARGET OF EARLY ACTIVATION TAGGED (EAT) |
| | 1, related to AP2.7. Chr2: 12226168-12228251 REVERSE LENGTH = 464 |
| 4395 | AT2G28810.1 Symbols: no symbol available: no full name available. Chr2: 12363681-12365080 |
| | FORWARD LENGTH = 340 |
| 4396 | AT2G29190.1 Symbols: PUM2, APUM2: pumilio 2. Chr2: 12544260-12548071 REVERSE |
| | LENGTH = 972 |
| 4397 | AT2G29290.2 Symbols: no symbol available: no full name available. Chr2: 12586498-12587684 |
| | FORWARD LENGTH = 262 |
| 4398 | AT2G29600.1 Symbols: no symbol available: no full name available. Chr2: 12655661-12656908 |
| | FORWARD LENGTH = 415 |
| 4399 | AT2G30370.1 Symbols: AtEPFL6, EPFL6, CHAL: EPF1-like 6, CHALLAH. Chr2: 12940577-12942167 |
| | REVERSE LENGTH = 230 |
| 4400 | AT2G30520.1 Symbols: RPT2: ROOT PHOTOTROPISM 2. Chr2: 13002920-13005573 REVERSE |
| | LENGTH = 593 |
| 4401 | AT2G30590.1 Symbols: WRKY21: WRKY DNA-binding protein 21. Chr2: 13033891-13035303 |
| | FORWARD LENGTH = 380 |
| 4402 | AT2G30600.5 Symbols: no symbol available: no full name available. Chr2: 13037410-13041475 |
| | FORWARD LENGTH = 855 |
| 4403 | AT2G30942.1 Symbols: ssSPTb: small subunit of SPT b. Chr2: 13170953-13171835 FORWARD |
| | LENGTH = 56 |
| 4404 | AT2G31010.1 Symbols: no symbol available: no full name available. Chr2: 13194939-13199642 |
| | FORWARD LENGTH = 775 |
| 4405 | AT2G31070.1 Symbols: TCP10: TCP domain protein 10. Chr2: 13220984-13222069 REVERSE |
| | LENGTH = 361 |
| 4406 | AT2G31280.3 Symbols: LL2, CPUORF7, LHL2: conserved peptide upstream open reading frame |
| | 7, LONESOME HIGHWAY LIKE 2. Chr2: 13339678-13343424 FORWARD LENGTH = 737 |
| 4407 | AT2G31490.1 Symbols: no symbol available: no full name available. Chr2: 13412060-13413002 |
| | FORWARD LENGTH = 71 |
| 4408 | AT2G32190.1 Symbols: no symbol available: no full name available. Chr2: 13674588-13675092 |
| | FORWARD LENGTH = 71 |
| 4409 | AT2G32235.1 Symbols: no symbol available: no full name available. Chr2: 13682823-13684199 |
| | REVERSE LENGTH = 310 |
| 4410 | AT2G32250.1 Symbols: FRS2: FAR1-related sequence 2. Chr2: 13693518-13696783 FORWARD |
| | LENGTH = 807 |
| 4411 | AT2G32320.2 Symbols: no symbol available: no full name available. Chr2: 13727938-13731428 |
| | FORWARD LENGTH = 537 |
| 4412 | AT2G32430.1 Symbols: no symbol available: no full name available. Chr2: 13771626-13774102 |
| | FORWARD LENGTH = 409 |
| 4413 | AT2G32440.1 Symbols: CYP88A4, KAO2, ATKAO2: ARABIDOPSIS ENT-KAURENOIC ACID |
| | HYDROXYLASE 2, ent-kaurenoic acid hydroxylase 2. Chr2: 13775668-13777783 FORWARD |
| | LENGTH = 489 |
| 4414 | AT2G32890.1 Symbols: RALFL17: RALF-like 17. Chr2: 13953058-13953291 REVERSE LENGTH = 77 |
| 4415 | AT2G33170.1 Symbols: no symbol available: no full name available. Chr2: 14056371-14059829 |
| | REVERSE LENGTH = 1124 |
| 4416 | AT2G33390.1 Symbols: no symbol available: no full name available. Chr2: 14151714-14152698 |
| | FORWARD LENGTH = 98 |
| 4417 | AT2G33700.1 Symbols: PP2CG1: protein phosphatase 2C G Group 1. Chr2: 14254200-14255784 |
| | FORWARD LENGTH = 380 |
| 4418 | AT2G33770.1 Symbols: PHO2, ATUBC24, UBC24: UBIQUITIN-CONJUGATING ENZYME |
| | 24, phosphate 2. Chr2: 14277785-14281482 REVERSE LENGTH = 907 |
| 4419 | AT2G34260.1 Symbols: WDR55: human WDR55 (WD40 repeat) homolog. Chr2: 14465899-14468416 |
| | FORWARD LENGTH = 353 |
| 4420 | AT2G34660.1 Symbols: EST4, ATMRP2, MRP2, AtABCC2, ABCC2: ATP-binding cassette C2, multidrug |
| | resistance-associated protein 2, Arabidopsis thaliana ATP-binding cassette C2. Chr2: 14603267-14612387 |
| | FORWARD LENGTH = 1623 |
| 4421 | AT2G34670.2 Symbols: no symbol available: no full name available. Chr2: 14612741-14615231 |
| | REVERSE LENGTH = 694 |
| 4422 | AT2G34780.1 Symbols: EMB1611, MEE22: MATERNAL EFFECT EMBRYO ARREST 22, EMBRYO |
| | DEFECTIVE 1611. Chr2: 14668653-14673607 FORWARD LENGTH = 1297 |
| 4423 | AT2G35155.1 Symbols: no symbol available: no full name available. Chr2: 14819209-14821330 |
| | REVERSE LENGTH = 579 |
| 4424 | AT2G35310.1 Symbols: REM23: reproductive meristem 23. Chr2: 14864943-14866404 FORWARD |
| | LENGTH = 288 |
| 4425 | AT2G35390.2 Symbols: no symbol available: no full name available. Chr2: 14895528-14897581 |
| | REVERSE LENGTH = 403 |
| 4426 | AT2G35510.1 Symbols: SRO1: similar to RCD one 1. Chr2: 14916898-14919198 REVERSE |
| | LENGTH = 568 |
| 4427 | AT2G35600.1 Symbols: BRXL1, ATBRXL1: ARABIDOPSIS THALIANA BREVIS RADIX LIKE |
| | 1, BREVIS RADIX-like 1. Chr2: 14941092-14943281 REVERSE LENGTH = 331 |
| 4428 | AT2G35660.1 Symbols: CTF2A.: Chr2: 14988499-14990320 FORWARD LENGTH = 439 |
| 4429 | AT2G35680.1 Symbols: no symbol available: no full name available. Chr2: 14997004-14998590 |
| | REVERSE LENGTH = 337 |
| 4430 | AT2G35750.1 Symbols: no symbol available: no full name available. Chr2: 15029904-15030089 |
| | REVERSE LENGTH = 61 |
| 4431 | AT2G35800.1 Symbols: SAMTL: S-adenosyl methionine transporter-like. Chr2: 15044437-15048352 |
| | FORWARD LENGTH = 823 |
| 4432 | AT2G35880.1 Symbols: no symbol available: no full name available. Chr2: 15063204-15065259 |
| | REVERSE LENGTH = 432 |
| 4433 | AT2G35940.1 Symbols: EDA29, BLH1: BEL1-like homeodomain 1, embryo sac development arrest 29. |
| | Chr2: 15089171-15091699 REVERSE LENGTH = 680 |
| 4434 | AT2G36210.1 Symbols: SAUR45: SMALL AUXIN UPREGULATED RNA 45. Chr2: 15186326- |
| | 15186733 REVERSE LENGTH = 135 |
| 4435 | AT2G36370.1 Symbols: no symbol available: no full name available. Chr2: 15247768-15252800 |
| | FORWARD LENGTH = 940 |
| 4436 | AT2G36460.1 Symbols: FBA6: fructose-bisphosphate aldolase 6. Chr2: 15296929-15298387 REVERSE |
| | LENGTH = 358 |
| 4437 | AT2G36470.1 Symbols: no symbol available: no full name available. Chr2: 15299385-15300368 |
| | REVERSE LENGTH = 327 |
| 4438 | AT2G36720.1 Symbols: no symbol available: no full name available. Chr2: 15393447-15399189 |
| | FORWARD LENGTH = 1007 |
| 4439 | AT2G36840.1 Symbols: ACR10: ACT domain repeats 10. Chr2: 15451834-15453550 REVERSE |
| | LENGTH = 410 |
| 4440 | AT2G36960.3 Symbols: TKI1: TSL-kinase interacting protein 1. Chr2: 15523552-15527245 FORWARD |
| | LENGTH = 744 |
| 4441 | AT2G37080.1 Symbols: RIP2: ROP interactive partner 2. Chr2: 15581565-15584057 REVERSE |
| | LENGTH = 583 |
| 4442 | AT2G37150.3 Symbols: no symbol available: no full name available. Chr2: 15603748-15607600 |
| | REVERSE LENGTH = 599 |
| 4443 | AT2G37160.2 Symbols: no symbol available: no full name available. Chr2: 15609047-15612529 |
| | FORWARD LENGTH = 573 |
| 4444 | AT2G37340.1 Symbols: RS2Z33, RSZ33, ATRSZ33, AT-RS2Z33: arginine/serine-rich zinc knuckle- |
| | containing protein 33, ARGININE/SERINE-RICH ZINC KNUCKLE-CONTAINING PROTEIN 33. |
| | Chr2: 15670372-15672331 REVERSE LENGTH = 290 |
| 4445 | AT2G37480.1 Symbols: no symbol available: no full name available. Chr2: 15738645-15739579 |
| | FORWARD LENGTH = 194 |
| 4446 | AT2G37570.1 Symbols: SLT1: sodium- and lithium-tolerant 1. Chr2: 15761466-15762950 REVERSE |
| | LENGTH = 494 |
| 4447 | AT2G37840.1 Symbols: no symbol available: no full name available. Chr2: 15851978-15856047 |
| | FORWARD LENGTH = 733 |
| 4448 | AT2G37890.1 Symbols: no symbol available: no full name available. Chr2: 15862017-15863849 |
| | REVERSE LENGTH = 337 |
| 4449 | AT2G38040.1 Symbols: CAC3: acetyl Co-enzyme a carboxylase carboxyltransferase alpha subunit. |
| | Chr2: 15917612-15920749 FORWARD LENGTH = 769 |
| 4450 | AT2G38290.1 Symbols: ATAMT2, AMT2, AMT2 1: ammonium transporter 2, AMMONIUM |
| | TRANSPORTER 2 1. Chr2: 16039672-16042291 REVERSE LENGTH = 475 |
| 4451 | AT2G38820.2 Symbols: no symbol available: no full name available. Chr2: 16222271-16223393 |
| | FORWARD LENGTH = 310 |
| 4452 | AT2G39280.2 Symbols: no symbol available: no full name available. Chr2: 16402001-16406650 |
| | REVERSE LENGTH = 772 |
| 4453 | AT2G39970.1 Symbols: PXN, APEM3, PMP38: peroxisomal NAD carrier, peroxisomal membrane protein |
| | 38, ABERRANT PEROXISOME MORPHOLOGY 3. Chr2: 16684026-16686392 REVERSE |
| | LENGTH = 331 |
| 4454 | AT2G40120.1 Symbols: no symbol available: no full name available. Chr2: 16755137-16757258 |
| | REVERSE LENGTH = 570 |
| 4455 | AT2G40460.1 Symbols: no symbol available: no full name available. Chr2: 16897123-16901171 |
| | FORWARD LENGTH = 583 |
| 4456 | AT2G41100.1 Symbols: TCH3, CML12, ATCAL4: ARABIDOPSIS THALIANA CALMODULIN LIKE |
| | 4, calmodulin-like 12, TOUCH 3. Chr2: 17138131-17139406 FORWARD LENGTH = 324 |
| 4457 | AT2G41430.1 Symbols: ERD15, CID1, LSR1: CTC-Interacting Domain 1, LIGHT STRESS- |
| | REGULATED I, EARLY RESPONSIVE TO DEHYDRATION 15. Chr2: 17269736-172703 14 |
| | FORWARD LENGTH = 163 |
| 4458 | AT2G41440.1 Symbols: no symbol available: no full name available. Chr2: 17271792-17274065 |
| | FORWARD LENGTH = 289 |
| 4459 | AT2G41710.3 Symbols: no symbol available: no full name available. Chr2: 17400274-17402903 |
| | REVERSE LENGTH = 458 |
| 4460 | AT2G41830.1 Symbols: no symbol available: no full name available. Chr2: 17450431-17456453 |
| | REVERSE LENGTH = 1025 |
| 4461 | AT2G42030.1 Symbols: no symbol available: no full name available. Chr2: 17539069-17540346 |
| | REVERSE LENGTH = 425 |
| 4462 | AT2G42300.1 Symbols: no symbol available: no full name available. Chr2: 17621542-17624635 |
| | FORWARD LENGTH = 327 |
| 4463 | AT2G42320.1 Symbols: no symbol available: no full name available. Chr2: 17628102-17630657 |
| | FORWARD LENGTH = 669 |
| 4464 | AT2G42380.2 Symbols: BZIP34, ATBZIP34.: Chr2: 17647205-17648660 REVERSE LENGTH = 321 |
| 4465 | AT2G42880.1 Symbols: MPK20, ATMPK20: MAP kinase 20. Chr2: 17840572-17843947 REVERSE |
| | LENGTH = 606 |
| 4466 | AT2G43320.1 Symbols: no symbol available: no full name available. Chr2: 17996874-17999158 |
| | REVERSE LENGTH = 351 |
| 4467 | AT2G43430.1 Symbols: GLX2-1, GLY1: glyoxalase 2-1, GLYOXALASE II. Chr2: 18035569-18038064 |
| | REVERSE LENGTH = 331 |
| 4468 | AT2G43745.1 Symbols: no symbol available: no full name available. Chr2: 18128859-18129355 |
| | REVERSE LENGTH = 136 |
| 4469 | AT2G44090.1 Symbols: no symbol available: no full name available. Chr2: 18238682-18240828 |
| | REVERSE LENGTH = 582 |
| 4470 | AT2G44410.1 Symbols: no symbol available: no full name available. Chr2: 18328873-18330114 |
| | FORWARD LENGTH = 413 |
| 4471 | AT2G44650.1 Symbols: CHL-CPN10, CPN10: CHLOROPLAST CHAPERONIN 10, chloroplast |
| | chaperonin 10. Chr2: 18419521-18420510 REVERSE LENGTH = 139 |
| 4472 | AT2G44670.1 Symbols: no symbol available: no full name available. Chr2: 18425279-18425673 |
| | FORWARD LENGTH = 93 |
| 4473 | AT2G44850.1 Symbols: no symbol available: no full name available. Chr2: 18498672-18500823 |
| | FORWARD LENGTH = 400 |
| 4474 | AT2G44900.1 Symbols: ARABIDILLO-1, ARABIDILLO1: F-box Armadillo protein 1, ARABIDILLO-1. |
| | Chr2: 18511719-18515762 REVERSE LENGTH = 930 |
| 4475 | AT2G45010.1 Symbols: no symbol available: no full name available. Chr2: 18568045-18569615 |
| | FORWARD LENGTH = 244 |
| 4476 | AT2G45380.1 Symbols: no symbol available: no full name available. Chr2: 18699588-18703093 |
| | REVERSE LENGTH = 494 |
| 4477 | AT2G45460.3 Symbols: no symbol available: no full name available. Chr2: 18737054-18741690 |
| | REVERSE LENGTH = 916 |
| 4478 | AT2G45600.1 Symbols: no symbol available: no full name available. Chr2: 18789799-18790788 |
| | FORWARD LENGTH = 329 |
| 4479 | AT2G45850.1 Symbols: AHL9: AT-hook motif nuclear localized protein 9. Chr2: 18871901-18873457 |
| | REVERSE LENGTH = 348 |
| 4480 | AT2G46210.1 Symbols: AtSLD2, SLD2: sphingoid LCB desaturase 2. Chr2: 18977542-18978891 |
| | FORWARD LENGTH = 449 |
| 4481 | AT2G46500.1 Symbols: ATPI4K GAMMA 4, UBDK GAMMA 4, PI4K GAMMA 4: phosphoinositide 4- |
| | kinase gamma 4, UBIQUITIN-LIKE DOMAIN KINASE GAMMA 4. Chr2: 19086741-19088534 |
| | REVERSE LENGTH = 566 |
| 4482 | AT2G46590.2 Symbols: DAG2: DOF AFFECTING GERMINATION 2. Chr2: 19133166-19134905 |
| | FORWARD LENGTH = 369 |
| 4483 | AT2G46830.1 Symbols: CCA1, AtCCA1: circadian clock associated 1. Chr2: 19246005-19248717 |
| | FORWARD LENGTH = 608 |
| 4484 | AT2G47020.1 Symbols: no symbol available: no full name available. Chr2: 19320090-19322279 |
| | REVERSE LENGTH = 413 |
| 4485 | AT2G47160.2 Symbols: AtBORI, BORI: REQUIRES HIGH BORON 1. Chr2: 19357740-19360787 |
| | REVERSE LENGTH = 729 |
| 4486 | AT2G47410.1 Symbols: no symbol available: no full name available. Chr2: 19449133-19456991 |
| | FORWARD LENGTH = 1520 |
| 4487 | AT2G47490.1 Symbols: ATNDT1, NDT1: ARABIDOPSIS THALIANA NAD+ TRANSPORTER |
| | 1, NAD+ transporter 1. Chr2: 19487549-19489311 FORWARD LENGTH = 312 |
| 4488 | AT2G47850.1 Symbols: no symbol available: no full name available. Chr2: 19595953-19598119 |
| | FORWARD LENGTH = 468 |
| 4489 | AT2G47900.3 Symbols: AtTLP3, TLP3: tubby like protein 3. Chr2: 19611196-19612766 REVERSE |
| | LENGTH = 407 |
| 4490 | AT2G47930.1 Symbols: AGP26, ATAGP26: ARABIDOPSIS THALIANA ARABINOGALACTAN |
| | PROTEIN 26, arabinogalactan protein 26. Chr2: 19617219-19617629 REVERSE LENGTH = 136 |
| 4491 | AT3G01090.2 Symbols: KIN10, SNRK1.1, AKIN10: SNF1 kinase homolog 10, SNF1-RELATED |
| | PROTEIN KINASE 1.1. Chr3: 31437-34143 REVERSE LENGTH = 535 |
| 4492 | AT3G01130.1 Symbols: no symbol available: no full name available. Chr3: 44714-45522 REVERSE |
| | LENGTH = 53 |
| 4493 | AT3G01170.1 Symbols: no symbol available: no full name available. Chr3: 58043-58690 FORWARD |
| | LENGTH = 215 |
| 4494 | AT3G01470.1 Symbols: HD-ZIP-1, ATHB-1, ATHB1, HAT5, HB-1: homeobox 1, HOMEODOMAIN |
| | PROTEIN FROM ARABIDOIPSIS THALIANA 5, ARABIDOPSIS THALIANA HOMEOBOX 1. |
| | Chr3: 182648-184034 REVERSE LENGTH = 272 |
| 4495 | AT3G01810.1 Symbols: no symbol available: no full name available. Chr3: 289218-292557 FORWARD |
| | LENGTH = 921 |
| 4496 | AT3G01980.3 Symbols: no symbol available: no full name available. Chr3: 327747-328833 REVERSE |
| | LENGTH = 296 |
| 4497 | AT3G02065.2 Symbols: no symbol available: no full name available. Chr3: 359136-360734 FORWARD |
| | LENGTH = 505 |
| 4498 | AT3G02470.1 Symbols: SAMDC: S-adenosylmethionine decarboxylase. Chr3: 510223-511323 |
| | FORWARD LENGTH = 366 |
| 4499 | AT3G02750.3 Symbols: no symbol available: no full name available. Chr3: 593601-595457 REVERSE |
| | LENGTH = 527 |
| 4500 | AT3G03300.1 Symbols: ATDCL2, DCL2: DICER-LIKE 2, dicer-like 2. Chr3: 768020-774833 REVERSE |
| | LENGTH = 1388 |
| 4501 | AT3G03890.1 Symbols: no symbol available: no full name available. Chr3: 999667-1001996 REVERSE |
| | LENGTH = 321 |
| 4502 | AT3G03970.1 Symbols: SINE2.: Chr3: 1028144-1029891 REVERSE LENGTH = 554 |
| 4503 | AT3G04450.1 Symbols: no symbol available: no full name available. Chr3: 1184302-1186264 |
| | FORWARD LENGTH = 442 |
| 4504 | AT3G04580.1 Symbols: EIN4: ETHYLENE INSENSITIVE 4. Chr3: 1235576-1237965 REVERSE |
| | LENGTH = 766 |
| 4505 | AT3G04670.1 Symbols: WRKY39, ATWRKY39: WRKY DNA-BINDING PROTEIN 39, WRKY DNA- |
| | binding protein 39. Chr3: 1266530-1267691 REVERSE LENGTH = 330 |
| 4506 | AT3G04810.1 Symbols: ATNEK2, NEK2: NIMA-related kinase 2. Chr3: 1318096-1321101 FORWARD |
| | LENGTH = 606 |
| 4507 | AT3G04910.1 Symbols: ZIK4, WNK1, ATWNK1: with no lysine (K) kinase 1. Chr3: 1355084-1358057 |
| | FORWARD LENGTH = 700 |
| 4508 | AT3G05030.1 Symbols: NHX2, ATNHX2: sodium hydrogen exchanger 2. Chr3: 1393456-1396784 |
| | REVERSE LENGTH = 546 |
| 4509 | AT3G05160.1 Symbols: no symbol available: no full name available. Chr3: 1453267-1456997 |
| | REVERSE LENGTH = 458 |
| 4510 | AT3G05380.2 Symbols: ALY2, ATALY2: ARABIDOPSIS THALIANA ALWAYS EARLY |
| | 2, ALWAYS EARLY 2. Chr3: 1540562-1546139 FORWARD LENGTH = 1052 |
| 4511 | AT3G05560.1 Symbols: no symbol available: no full name available. Chr3: 1614641-1615204 |
| | FORWARD LENGTH = 124 |
| 4512 | AT3G05580.1 Symbols: TOPP9: type one protein phosphatase 9. Chr3: 1618216-1619850 REVERSE |
| | LENGTH = 318 |
| 4513 | AT3G05690.1 Symbols: ATHAP2B, AtNF-YA2, UNE8, HAP2B, NF-YA2: UNFERTILIZED EMBRYO |
| | SAC 8, HEME ACTIVATOR PROTEIN (YEAST) HOMOLOG 2B, “nuclear factor Y, subunit A2”. |
| | Chr3: 1676922-1678324 REVERSE LENGTH = 295 |
| 4514 | AT3G05710.2 Symbols: ATSYP43, SYP43: syntaxin of plants 43. Chr3: 1685262-1687229 FORWARD |
| | LENGTH = 331 |
| 4515 | AT3G05750.1 Symbols: TRM6: TON1 Recruiting Motif 6. Chr3: 1704677-1707546 FORWARD |
| | LENGTH = 801 |
| 4516 | AT3G05937.1 Symbols: no symbol available: no full name available. Chr3: 1776158-1776319 |
| | REVERSE LENGTH = 53 |
| 4517 | AT3G06270.1 Symbols: no symbol available: no full name available. Chr3: 1896763-1897887 |
| | FORWARD LENGTH = 348 |
| 4518 | AT3G06360.1 Symbols: AGP27, ATAGP27: arabinogalactan protein 27, ARABINOGALACTAN |
| | PROTEIN 27. Chr3: 1928976-1929353 FORWARD LENGTH = 125 |
| 4519 | AT3G06620.1 Symbols: no symbol available: no full name available. Chr3: 2062833-2067138 |
| | REVERSE LENGTH = 773 |
| 4520 | AT3G07100.1 Symbols: SEC24A, ERMO2, AtSEC24A: ENDOPLASMIC RETICULUM |
| | MORPHOLOGY 2. Chr3: 2245689-2250077 REVERSE LENGTH = 1038 |
| 4521 | AT3G07170.1 Symbols: no symbol available: no full name available. Chr3: 2280428-2282097 |
| | FORWARD LENGTH = 203 |
| 4522 | AT3G07210.1 Symbols: no symbol available: no full name available. Chr3: 2293000-2295119 |
| | REVERSE LENGTH = 547 |
| 4523 | AT3G07550.1 Symbols: no symbol available: no full name available. Chr3: 2409946-2411133 |
| | FORWARD LENGTH = 395 |
| 4524 | AT3G08510.1 Symbols: ATPLC2, PLC2: phospholipase C 2. Chr3: 2582626-2585556 REVERSE |
| | LENGTH = 581 |
| 4525 | AT3G08680.1 Symbols: no symbol available: no full name available. Chr3: 2638591-2640590 |
| | FORWARD LENGTH = 640 |
| 4526 | AT3G08730.1 Symbols: PK1, PK6, S6K1, ATPK1, ATPK6, ATS6K1: ARABIDOPSIS THALIANA |
| | PROTEIN-SERINE KINASE 1, ROTEIN-SERINE KINASE 6, P70 RIBOSOMAL S6 |
| | KINASE, ARABIDOPSIS THALIANA PROTEIN-SERINE KINASE 6, protein-serine kinase 1. |
| | Chr3: 2651581-2653363 REVERSE LENGTH = 465 |
| 4527 | AT3G08980.1 Symbols: no symbol available: no full name available. Chr3: 2741279-2742375 |
| | FORWARD LENGTH = 154 |
| 4528 | AT3G09150.2 Symbols: HY2, ATHY2, GUN3: GENOMES UNCOUPLED 3, ARABIDOPSIS |
| | ELONGATED HYPOCOTYL 2, ELONGATED HYPOCOTYL 2. Chr3: 2803665-2805333 FORWARD |
| | LENGTH = 329 |
| 4529 | AT3G09350.1 Symbols: Fes1A: Fes1A. Chr3: 2871216-2873109 FORWARD LENGTH = 363 |
| 4530 | AT3G09560.2 Symbols: ATPAH1, PAH1: PHOSPHATIDIC ACID PHOSPHOHYDROLASE 1. |
| | Chr3: 2934953-2938673 REVERSE LENGTH = 904 |
| 4531 | AT3G09820.1 Symbols: ATADK1, ADK1: adenosine kinase 1. Chr3: 3012122-3014624 FORWARD |
| | LENGTH = 344 |
| 4532 | AT3G09920.1 Symbols: PIP5K9: phosphatidyl inositol monophosphate 5 kinase. Chr3: 3040426- |
| | 3043676 REVERSE LENGTH = 815 |
| 4533 | AT3G10640.1 Symbols: VPS60.1.: Chr3: 3323501-3324905 REVERSE LENGTH = 235 |
| 4534 | AT3G10910.1 Symbols: DAFL1: DAF-Like gene 1. Chr3: 3413068-3413613 REVERSE LENGTH = 181 |
| 4535 | AT3G10915.5 Symbols: no symbol available: no full name available. Chr3: 3416101-3417497 |
| | REVERSE LENGTH = 249 |
| 4536 | AT3G10930.1 Symbols: no symbol available: no full name available. Chr3: 3420228-3420533 |
| | REVERSE LENGTH = 101 |
| 4537 | AT3G11200.1 Symbols: AL2: alfin-like 2. Chr3: 3508387-3510418 REVERSE LENGTH = 246 |
| 4538 | AT3G11320.1 Symbols: no symbol available: no full name available. Chr3: 3547017-3548539 |
| | REVERSE LENGTH = 308 |
| 4539 | AT3G11530.1 Symbols: no symbol available: no full name available. Chr3: 3628801-3629885 |
| | REVERSE LENGTH = 113 |
| 4540 | AT3G11850.1 Symbols: no symbol available: no full name available. Chr3: 3739222-3741101 |
| | REVERSE LENGTH = 504 |
| 4541 | AT3G12200.2 Symbols: Nek7, AtNek7: NIMA-related kinase 7. Chr3: 3887173-3890550 REVERSE |
| | LENGTH = 581 |
| 4542 | AT3G12280.1 Symbols: ATRBR1, RBR1, RB1, RB, RBR: RETINOBLASTOMA- |
| | RELATED, RETINOBLASTOMA 1, RETINOBLASTOMA-RELATED PROTEIN 1, retinoblastoma- |
| | related 1. Chr3: 3913671-3918433 REVERSE LENGTH = 1013 |
| 4543 | AT3G12550.1 Symbols: FDM3: factor of DNA methylation 3. Chr3: 3978669-3981372 FORWARD |
| | LENGTH = 638 |
| 4544 | AT3G12570.1 Symbols: FYD.: Chr3: 3989407-3990876 FORWARD LENGTH = 489 |
| 4545 | AT3G12620.1 Symbols: no symbol available: no full name available. Chr3: 4009510-4010993 |
| | REVERSE LENGTH = 385 |
| 4546 | AT3G12770.1 Symbols: MEF22: mitochondrial editing factor 22. Chr3: 4057027-4059193 REVERSE |
| | LENGTH = 694 |
| 4547 | AT3G13000.2 Symbols: no symbol available: no full name available. Chr3: 4158214-4160989 |
| | REVERSE LENGTH = 582 |
| 4548 | AT3G13030.1 Symbols: no symbol available: no full name available. Chr3: 4169675-4171417 |
| | REVERSE LENGTH = 544 |
| 4549 | AT3G13190.1 Symbols: no symbol available: no full name available. Chr3: 4240751-4241804 |
| | FORWARD LENGTH = 316 |
| 4550 | AT3G13430.1 Symbols: no symbol available: no full name available. Chr3: 4367754-4368701 |
| | FORWARD LENGTH = 315 |
| 4551 | AT3G13440.1 Symbols: no symbol available: no full name available. Chr3: 4378338-4379347 |
| | FORWARD LENGTH = 278 |
| 4552 | AT3G13580.3 Symbols: no symbol available: no full name available. Chr3: 4433809-4435109 |
| | FORWARD LENGTH = 244 |
| 4553 | AT3G13690.1 Symbols: no symbol available: no full name available. Chr3: 4486920-4490011 |
| | FORWARD LENGTH = 753 |
| 4554 | AT3G13700.1 Symbols: no symbol available: no full name available. Chr3: 4491008-4492632 |
| | REVERSE LENGTH = 296 |
| 4555 | AT3G13857.1 Symbols: no symbol available: no full name available. Chr3: 4561171-4561299 |
| | FORWARD LENGTH = 42 |
| 4556 | AT3G14010.1 Symbols: CID4: CTC-interacting domain 4. Chr3: 4637164-4640691 FORWARD |
| | LENGTH = 595 |
| 4557 | AT3G14020.1 Symbols: NF-YA6: “nuclear factor Y, subunit A6”. Chr3: 4642968-4644301 FORWARD |
| | LENGTH = 308 |
| 4558 | AT3G14110.3 Symbols: FLU: FLUORESCENT IN BLUE LIGHT. Chr3: 4676222-4677602 REVERSE |
| | LENGTH = 317 |
| 4559 | AT3G14172.1 Symbols: no symbol available: no full name available. Chr3: 4698860-4704773 |
| | REVERSE LENGTH = 1270 |
| 4560 | AT3G14415.2 Symbols: GOX2: glycolate oxidase 2. Chr3: 4818667-4820748 FORWARD |
| | LENGTH = 373 |
| 4561 | AT3G14590.2 Symbols: NTMC2TYPE6.2, NTMC2T6.2.: Chr3: 4904448-4907741 REVERSE |
| | LENGTH = 737 |
| 4562 | AT3G15030.1 Symbols: MEE35, TCP4: TCP family transcription factor 4, maternal effect embryo arrest |
| | 35. Chr3: 5062308-5063570 FORWARD LENGTH = 420 |
| 4563 | AT3G15220.1 Symbols: no symbol available: no full name available. Chr3: 5126899-5131752 |
| | REVERSE LENGTH = 690 |
| 4564 | AT3G15350.1 Symbols: no symbol available: no full name available. Chr3: 5167250-5168882 |
| | FORWARD LENGTH = 424 |
| 4565 | AT3G15351.1 Symbols: no symbol available: no full name available. Chr3: 5176726-5177531 |
| | FORWARD LENGTH = 165 |
| 4566 | AT3G15354.1 Symbols: SPA3: SPA1-related 3. Chr3: 5169327-5172480 REVERSE LENGTH = 837 |
| 4567 | AT3G15430.1 Symbols: no symbol available: no full name available. Chr3: 5209408-5211562 |
| | FORWARD LENGTH = 488 |
| 4568 | AT3G17120.1 Symbols: no symbol available: no full name available. Chr3: 5842410-5843246 |
| | FORWARD LENGTH = 219 |
| 4569 | AT3G17310.2 Symbols: DRM3, AtDRM3: domains rearranged methyltransferase 3. Chr3: 5909294- |
| | 5912838 REVERSE LENGTH = 710 |
| 4570 | AT3G17450.1 Symbols: no symbol available: no full name available. Chr3: 5972793-5975684 |
| | REVERSE LENGTH = 877 |
| 4571 | AT3G17580.1 Symbols: no symbol available: no full name available. Chr3: 6015276-6015518 |
| | FORWARD LENGTH = 80 |
| 4572 | AT3G17609.2 Symbols: HYH: HY5-homolog. Chr3: 6023971-6024585 FORWARD LENGTH = 149 |
| 4573 | AT3G17611.1 Symbols: ATRBL10, RBL14, ATRBL14, RBL10: RHOMBOID-like protein |
| | 14, RHOMBOID-like protein 10. Chr3: 6024946-6026173 FORWARD LENGTH = 334 |
| 4574 | AT3G17950.1 Symbols: no symbol available: no full name available. Chr3: 6146311-6147169 |
| | FORWARD LENGTH = 211 |
| 4575 | AT3G18160.3 Symbols: PEX3-1: peroxin 3-1. Chr3: 6220918-6222923 FORWARD LENGTH = 376 |
| 4576 | AT3G18370.1 Symbols: NTMC2T3, NTMC2TYPE3, SYTF, ATSYTF.: Chr3: 6306362-6310256 |
| | FORWARD LENGTH = 815 |
| 4577 | AT3G18620.1 Symbols: no symbol available: no full name available. Chr3: 6408849-6410716 |
| | FORWARD LENGTH = 345 |
| 4578 | AT3G18770.1 Symbols: no symbol available: no full name available. Chr3: 6460026-6462510 |
| | REVERSE LENGTH = 625 |
| 4579 | AT3G19250.1 Symbols: no symbol available: no full name available. Chr3: 6666842-6668008 |
| | REVERSE LENGTH = 360 |
| 4580 | AT3G19440.1 Symbols: no symbol available: no full name available. Chr3: 6740778-6743132 |
| | FORWARD LENGTH = 477 |
| 4581 | AT3G20040.1 Symbols: ATHXK4, HKL2: HEXOKINASE-LIKE 2. Chr3: 6995317-6998064 |
| | FORWARD LENGTH = 502 |
| 4582 | AT3G20200.1 Symbols: no symbol available: no full name available. Chr3: 7047895-7051145 |
| | FORWARD LENGTH = 780 |
| 4583 | AT3G20260.1 Symbols: no symbol available: no full name available. Chr3: 7064190-7065751 |
| | REVERSE LENGTH = 437 |
| 4584 | AT3G20430.1 Symbols: no symbol available: no full name available. Chr3: 7121480-7123074 |
| | FORWARD LENGTH = 265 |
| 4585 | AT3G20620.1 Symbols: no symbol available: no full name available. Chr3: 7198708-7199969 |
| | REVERSE LENGTH = 391 |
| 4586 | AT3G20810.2 Symbols: JMJ30, JMJD5: Jumonji C domain-containing protein 30, jumonji domain |
| | containing 5. Chr3: 7275814-7278144 FORWARD LENGTH = 429 |
| 4587 | AT3G20870.1 Symbols: ZTP29: zinc transporter 29. Chr3: 7309499-7312476 REVERSE LENGTH = 276 |
| 4588 | AT3G21250.2 Symbols: ATMRP6, ABCC8, MRP6: multidrug resistance-associated protein |
| | 6, ARABIDOPSIS THALIANA MULTIDRUG RESISTANCE-ASSOCIATED PROTEIN 6, ATP-binding |
| | cassette C8. Chr3: 7457668-7463261 REVERSE LENGTH = 1464 |
| 4589 | AT3G21295.1 Symbols: no symbol available: no full name available. Chr3: 7489635-7492296 |
| | FORWARD LENGTH = 645 |
| 4590 | AT3G21310.1 Symbols: no symbol available: no full name available. Chr3: 7497774-7499011 |
| | FORWARD LENGTH = 383 |
| 4591 | AT3G21700.3 Symbols: SGP2, ATSGP2.: Chr3: 7644581-7646190 FORWARD LENGTH = 292 |
| 4592 | AT3G22415.1 Symbols: no symbol available: no full name available. Chr3: 7941337-7941540 |
| | FORWARD LENGTH = 67 |
| 4593 | AT3G22550.1 Symbols: no symbol available: no full name available. Chr3: 7991827-7992805 |
| | REVERSE LENGTH = 267 |
| 4594 | AT3G22750.1 Symbols: no symbol available: no full name available. Chr3: 8037364-8039096 |
| | REVERSE LENGTH = 378 |
| 4595 | AT3G22970.1 Symbols: no symbol available: no full name available. Chr3: 8152592-8153881 |
| | FORWARD LENGTH = 370 |
| 4596 | AT3G23160.1 Symbols: no symbol available: no full name available. Chr3: 8260059-8261654 |
| | REVERSE LENGTH = 531 |
| 4597 | AT3G24070.1 Symbols: no symbol available: no full name available. Chr3: 8693543-8694331 |
| | FORWARD LENGTH = 262 |
| 4598 | AT3G24490.1 Symbols: no symbol available: no full name available. Chr3: 8911022-8912023 |
| | FORWARD LENGTH = 333 |
| 4599 | AT3G25570.1 Symbols: no symbol available: no full name available. Chr3: 9287413-9288462 |
| | REVERSE LENGTH = 349 |
| 4600 | AT3G25585.2 Symbols: AAPT2, ATAAPT2: aminoalcoholphosphotransferase. Chr3: 9295856-9298271 |
| | FORWARD LENGTH = 389 |
| 4601 | AT3G25590.1 Symbols: no symbol available: no full name available. Chr3: 9302271-9303542 |
| | FORWARD LENGTH = 423 |
| 4602 | AT3G25597.1 Symbols: no symbol available: no full name available. Chr3: 9306103-9306585 |
| | FORWARD LENGTH = 160 |
| 4603 | AT3G25840.1 Symbols: no symbol available: no full name available. Chr3: 9452993-9457446 |
| | REVERSE LENGTH = 935 |
| 4604 | AT3G26000.1 Symbols: RIFP1: RCAR3 INTERACTING F-BOX PROTEIN 1. Chr3: 9507042- |
| | 9508542 REVERSE LENGTH = 453 |
| 4605 | AT3G26085.2 Symbols: no symbol available: no full name available. Chr3: 9530842-9532397 |
| | FORWARD LENGTH = 322 |
| 4606 | AT3G26100.2 Symbols: no symbol available: no full name available. Chr3: 9538063-9540149 |
| | FORWARD LENGTH = 532 |
| 4607 | AT3G26230.1 Symbols: CYP71B24: “cytochrome P450, family 71, subfamily B, polypeptide 24”. |
| | Chr3: 9598200-9599892 REVERSE LENGTH = 498 |
| 4608 | AT3G26430.1 Symbols: no symbol available: no full name available. Chr3: 9674419-9675889 |
| | FORWARD LENGTH = 380 |
| 4609 | AT3G26440.1 Symbols: no symbol available: no full name available. Chr3: 9677418-9679681 |
| | FORWARD LENGTH = 396 |
| 4610 | AT3G26690.1 Symbols: ATNUDX13, ATNUDT13, NUDX13: nudix hydrolase homolog |
| | 13, ARABIDOPSIS THALIANA NUDIX HYDROLASE HOMOLOG 13. Chr3: 9804418-9805398 |
| | REVERSE LENGTH = 202 |
| 4611 | AT3G26744.1 Symbols: ICE1, SCRM, ATICE1: A. THALIANA INDUCER OF CBP EXPRESSION |
| | 1, INDUCER OF CBF EXPRESSION 1, SCREAM. Chr3: 9832953-9834790 REVERSE LENGTH = 494 |
| 4612 | AT3G26890.1 Symbols: no symbol available: no full name available. Chr3: 9907456-9910463 |
| | REVERSE LENGTH = 649 |
| 4613 | AT3G26910.2 Symbols: no symbol available: no full name available. Chr3: 9915304-9918511 |
| | REVERSE LENGTH = 614 |
| 4614 | AT3G26920.1 Symbols: no symbol available: no full name available. Chr3: 9921241-9922429 |
| | FORWARD LENGTH = 340 |
| 4615 | AT3G27260.1 Symbols: GTE8: global transcription factor group E8. Chr3: 10068411-10072403 |
| | FORWARD LENGTH = 813 |
| 4616 | AT3G27330.1 Symbols: no symbol available: no full name available. Chr3: 10116950-10120516 |
| | REVERSE LENGTH = 913 |
| 4617 | AT3G27350.2 Symbols: no symbol available: no full name available. Chr3: 10126238-10127896 |
| | FORWARD LENGTH = 319 |
| 4618 | AT3G27510.1 Symbols: no symbol available: no full name available. Chr3: 10188240-10189562 |
| | REVERSE LENGTH = 440 |
| 4619 | AT3G27560.1 Symbols: ATNI.: Chr3: 10210597-10212507 REVERSE LENGTH = 356 |
| 4620 | AT3G27940.1 Symbols: LBD26: LOB domain-containing protein 26. Chr3: 10375897-10376358 |
| | FORWARD LENGTH = 153 |
| 4621 | AT3G28690.2 Symbols: no symbol available: no full name available. Chr3: 10755412-10757494 |
| | FORWARD LENGTH = 476 |
| 4622 | AT3G28920.1 Symbols: ZHD9, AtHB34, HB34: ZINC FINGER HOMEODOMAIN 9, homeobox protein |
| | 34. Chr3: 10940598-10941536 REVERSE LENGTH = 312 |
| 4623 | AT3G29130.2 Symbols: no symbol available: no full name available. Chr3: 11102546-11103847 |
| | REVERSE LENGTH = 168 |
| 4624 | AT3G41762.1 Symbols: no symbol available: no full name available. Chr3: 14195832-14196464 |
| | REVERSE LENGTH = 109 |
| 4625 | AT3G42150.2 Symbols: no symbol available: no full name available. Chr3: 14310567-14311465 |
| | FORWARD LENGTH = 100 |
| 4626 | AT3G43240.1 Symbols: no symbol available: no full name available. Chr3: 15210032-15214440 |
| | REVERSE LENGTH = 747 |
| 4627 | AT3G44740.1 Symbols: no symbol available: no full name available. Chr3: 16296410-16297687 |
| | REVERSE LENGTH = 244 |
| 4628 | AT3G45090.1 Symbols: no symbol available: no full name available. Chr3: 16490752-16494452 |
| | REVERSE LENGTH = 717 |
| 4629 | AT3G45240.1 Symbols: ATSNAK2, GRIK1: geminivirus rep interacting kinase 1. Chr3: 16570774- |
| | 16572902 REVERSE LENGTH = 396 |
| 4630 | AT3G45870.1 Symbols: UMAMIT3: Usually multiple acids move in and out Transporters 3. |
| | Chr3: 16867246-16868838 FORWARD LENGTH = 385 |
| 4631 | AT3G45960.2 Symbols: ATEXPL3, EXLA3, ATEXLA3, ATHEXP BETA 2.3, EXPL3: expansin-like A3. |
| | Chr3: 16892826-16893789 FORWARD LENGTH = 263 |
| 4632 | AT3G46590.2 Symbols: TRP2, TRFL1, ATTRP2: TRF-like 1. Chr3: 17153642-17155946 FORWARD |
| | LENGTH = 553 |
| 4633 | AT3G46930.1 Symbols: Raf43: Raf-Like Mitogen-Activated Protein Kinase Kinase Kinase 43. |
| | Chr3: 17285931-17288032 FORWARD LENGTH = 480 |
| 4634 | AT3G47390.1 Symbols: PHS1, PyrR: pyrimidine reductase, PHOTOSENSITIVE 1. Chr3: 17462094- |
| | 17464655 FORWARD LENGTH = 599 |
| 4635 | AT3G47550.3 Symbols: no symbol available: no full name available. Chr3: 17523841-17525278 |
| | FORWARD LENGTH = 288 |
| 4636 | AT3G47680.1 Symbols: no symbol available: no full name available. Chr3: 17577483-17578391 |
| | REVERSE LENGTH = 302 |
| 4637 | AT3G47965.1 Symbols: no symbol available: no full name available. Chr3: 17708096-17708709 |
| | REVERSE LENGTH = 44 |
| 4638 | AT3G48060.1 Symbols: no symbol available: no full name available. Chr3: 17743234-17748372 |
| | REVERSE LENGTH = 1611 |
| 4639 | AT3G49050.1 Symbols: no symbol available: no full name available. Chr3: 18181498-18183613 |
| | FORWARD LENGTH = 477 |
| 4640 | AT3G49290.1 Symbols: ABIL2: ABL interactor-like protein 2. Chr3: 18273407-18275221 FORWARD |
| | LENGTH = 312 |
| 4641 | AT3G49430.1 Symbols: SR34a, SRp34a, At-SR34a: Serine/Arginine-Rich Protein Splicing Factor |
| | 34a, SER/ARG-rich protein 34A. Chr3: 18332668-18334829 FORWARD LENGTH = 300 |
| 4642 | AT3G49690.1 Symbols: RAX3, MYB84, ATMYB84, SKI2: MYB DOMAIN PROTEIN 84, myb domain |
| | protein 84, REGULATOR OF AXILLARY MERISTEMS3. Chr3: 18427941-18429100 FORWARD |
| | LENGTH = 310 |
| 4643 | AT3G49725.1 Symbols: no symbol available: no full name available. Chr3: 18442448-18445397 |
| | REVERSE LENGTH = 620 |
| 4644 | AT3G49810.1 Symbols: atPub30: U-box protein 30. Chr3: 18474936-18476282 REVERSE |
| | LENGTH = 448 |
| 4645 | AT3G49845.1 Symbols: WIH3: WINDHOSE 3. Chr3: 18487339-18487965 FORWARD LENGTH = 124 |
| 4646 | AT3G50700.1 Symbols: AtIDD2, IDD2: indeterminate(ID)-domain 2. Chr3: 18840945-18842829 |
| | FORWARD LENGTH = 452 |
| 4647 | AT3G50860.1 Symbols: no symbol available: no full name available. Chr3: 18902346-18903959 |
| | FORWARD LENGTH = 166 |
| 4648 | AT3G51040.1 Symbols: RTH: RTE1-homolog. Chr3: 18952281-18953060 REVERSE LENGTH = 231 |
| 4649 | AT3G51140.1 Symbols: no symbol available: no full name available. Chr3: 18998182-18999437 |
| | FORWARD LENGTH = 278 |
| 4650 | AT3G51180.1 Symbols: no symbol available: no full name available. Chr3: 19013720-19016042 |
| | FORWARD LENGTH = 521 |
| 4651 | AT3G51290.1 Symbols: APSR1: Altered Phosphate Starvation Response 1. Chr3: 19039980-19042437 |
| | FORWARD LENGTH = 634 |
| 4652 | AT3G51300.1 Symbols: ROP1AT, ATRAC11, ROP1, ARAC11, ATROP1: Arabidopsis RAC-like |
| | 11, RHO-related protein from plants 1, ARABIDOPSIS THALIANA RHO-RELATED PROTEIN FROM |
| | PLANTS 1. Chr3: 19043197-19044215 FORWARD LENGTH = 197 |
| 4653 | AT3G51370.1 Symbols: no symbol available: no full name available. Chr3: 19070054-19071975 |
| | FORWARD LENGTH = 379 |
| 4654 | AT3G51480.1 Symbols: GLR3.6, ATGLR3.6: glutamate receptor 3.6. Chr3: 19101256-19104681 |
| | FORWARD LENGTH = 903 |
| 4655 | AT3G51630.1 Symbols: ATWNK5, ZIK1, WNK5: with no lysine (K) kinase 5. Chr3: 19149487-19151924 |
| | FORWARD LENGTH = 549 |
| 4656 | AT3G51950.1 Symbols: no symbol available: no full name available. Chr3: 19278244-19280407 |
| | REVERSE LENGTH = 540 |
| 4657 | AT3G52170.1 Symbols: no symbol available: no full name available. Chr3: 19347039-19349099 |
| | REVERSE LENGTH = 499 |
| 4658 | AT3G52290.1 Symbols: IQD3: IQ-domain 3. Chr3: 19394441-19396196 FORWARD LENGTH = 430 |
| 4659 | AT3G52730.1 Symbols: no symbol available: no full name available. Chr3: 19543146-19544167 |
| | REVERSE LENGTH = 72 |
| 4660 | AT3G52880.2 Symbols: ATMDAR1, MDAR1: monodehydroascorbate reductase 1. Chr3: 19601477- |
| | 19604366 REVERSE LENGTH = 466 |
| 4661 | AT3G52890.1 Symbols: KIPK: KCBP-interacting protein kinase. Chr3: 19609150-19612032 |
| | FORWARD LENGTH = 934 |
| 4662 | AT3G52990.1 Symbols: no symbol available: no full name available. Chr3: 19649046-19652237 |
| | FORWARD LENGTH = 527 |
| 4663 | AT3G53270.1 Symbols: no symbol available: no full name available. Chr3: 19750406-19752168 |
| | REVERSE LENGTH = 280 |
| 4664 | AT3G53500.2 Symbols: RS2Z32, At-RS2Z, RSZ32: arginine/serine-rich zinc knuckle-containing protein |
| | 32. Chr3: 19834557-19836507 REVERSE LENGTH = 284 |
| 4665 | AT3G53670.1 Symbols: no symbol available: no full name available. Chr3: 19891104-19892214 |
| | FORWARD LENGTH = 203 |
| 4666 | AT3G53850.1 Symbols: CASPL5B2: CASP-like protein 5B2. Chr3: 19948262-19948994 REVERSE |
| | LENGTH = 154 |
| 4667 | AT3G54010.1 Symbols: DEII, PASI: PASTICCINO 1. Chr3: 20001042-20005063 FORWARD |
| | LENGTH = 635 |
| 4668 | AT3G54190.1 Symbols: no symbol available: no full name available. Chr3: 20061759-20063880 |
| | REVERSE LENGTH = 467 |
| 4669 | AT3G54220.1 Symbols: SGR1, SCR: SCARECROW, SHOOT GRAVITROPISM I. Chr3: 20070550- |
| | 20072625 FORWARD LENGTH = 653 |
| 4670 | AT3G54350.1 Symbols: emb1967: embryo defective 1967. Chr3: 20122298-20126031 REVERSE |
| | LENGTH = 702 |
| 4671 | AT3G54380.1 Symbols: SAC3C, AtSAC3C: yeast Sac3 homolog C. Chr3: 20133985-20136752 |
| | REVERSE LENGTH = 406 |
| 4672 | AT3G55020.1 Symbols: no symbol available: no full name available. Chr3: 20389178-20394713 |
| | REVERSE LENGTH = 819 |
| 4673 | AT3G55050.1 Symbols: no symbol available: no full name available. Chr3: 20400669-20401922 |
| | REVERSE LENGTH = 384 |
| 4674 | AT3G55080.1 Symbols: no symbol available: no full name available. Chr3: 20411476-20415830 |
| | REVERSE LENGTH = 463 |
| 4675 | AT3G55140.1 Symbols: no symbol available: no full name available. Chr3: 20438819-20440225 |
| | FORWARD LENGTH = 331 |
| 4676 | AT3G55480.2 Symbols: PAT2, WATI, AP-3 beta: beta-subunit of adaptor protein complex 3, protein |
| | affected traf?cking 2, WEAK ACID TOLERANT 1. Chr3: 20566372-20571171 REVERSE |
| | LENGTH = 1115 |
| 4677 | AT3G55560.1 Symbols: AGF2, AHL15: AT-hook protein of GA feedback 2, AT-hook motif nuclear- |
| | localized protein 15. Chr3: 20604904-20605836 REVERSE LENGTH = 310 |
| 4678 | AT3G55820.1 Symbols: no symbol available: no full name available. Chr3: 20714041-20714655 |
| | FORWARD LENGTH = 204 |
| 4679 | AT3G55850.2 Symbols: LAF3 ISF2, LAF3 ISF1, LAF3: LAF3 ISOFORM 2, LONG AFTER FAR-RED 3 |
| | ISOFORM 1, LONG AFTER FAR-RED 3. Chr3: 20721866-20724721 REVERSE LENGTH = 461 |
| 4680 | AT3G55860.1 Symbols: no symbol available: no full name available. Chr3: 20727836-20728962 |
| | REVERSE LENGTH = 154 |
| 4681 | AT3G56130.1 Symbols: BLP3: BCCP-Like Protein 3. Chr3: 20826852-20829007 FORWARD |
| | LENGTH = 281 |
| 4682 | AT3G56270.1 Symbols: no symbol available: no full name available. Chr3: 20870220-20871854 |
| | FORWARD LENGTH = 446 |
| 4683 | AT3G56580.2 Symbols: RZF1, AtRZF1: RING Zinc Finger 1. Chr3: 20962563-20963525 FORWARD |
| | LENGTH = 320 |
| 4684 | AT3G56850.1 Symbols: DPBF3, AREB3: ABA-responsive element binding protein 3. Chr3: 21046554- |
| | 21047894 REVERSE LENGTH = 297 |
| 4685 | AT3G57630.1 Symbols: no symbol available: no full name available. Chr3: 21339543-21343080 |
| | REVERSE LENGTH = 793 |
| 4686 | AT3G57790.1 Symbols: no symbol available: no full name available. Chr3: 21405387-21407088 |
| | REVERSE LENGTH = 490 |
| 4687 | AT3G58030.1 Symbols: no symbol available: no full name available. Chr3: 21485527-21486837 |
| | FORWARD LENGTH = 436 |
| 4688 | AT3G58510.1 Symbols: no symbol available: no full name available. Chr3: 21640608-21643464 |
| | FORWARD LENGTH = 612 |
| 4689 | AT3G58520.1 Symbols: no symbol available: no full name available. Chr3: 21643921-21645277 |
| | REVERSE LENGTH = 418 |
| 4690 | AT3G58560.1 Symbols: AtCCR4a.: Chr3: 21650880-21653896 REVERSE LENGTH = 602 |
| 4691 | AT3G58650.1 Symbols: TRM7: TON1 Recruiting Motif 7. Chr3: 21696349-21699219 REVERSE |
| | LENGTH = 820 |
| 4692 | AT3G58670.1 Symbols: PCO5: plant cysteine oxidase 5. Chr3: 21703693-21705314 REVERSE |
| | LENGTH = 242 |
| 4693 | AT3G59470.1 Symbols: FRF1: FARI-RELATED SEQUENCES-RELATED FACTOR1. |
| | Chr3: 21979099-21980097 REVERSE LENGTH = 251 |
| 4694 | AT3G59570.1 Symbols: no symbol available: no full name available. Chr3: 22001030-22005402 |
| | REVERSE LENGTH = 720 |
| 4695 | AT3G59770.3 Symbols: AtSAC9, SAC9: ARABIDOPSIS THALIANA SUPPRESSOR OF ACTIN |
| | 9, SUPPRESSOR OF ACTIN 9. Chr3: 22079281-22085674 REVERSE LENGTH = 1646 |
| 4696 | AT3G60240.4 Symbols: EIF4G, CUM2: eukaryotic translation initiation factor 4G, CUCUMOVIRUS |
| | MULTIPLICATION 2. Chr3: 22261842-22268295 FORWARD LENGTH = 1727 |
| 4697 | AT3G60540.1 Symbols: no symbol available: no full name available. Chr3: 22375132-22375377 |
| | REVERSE LENGTH = 81 |
| 4698 | AT3G60800.1 Symbols: PAT14: protein acyltransferase 14. Chr3: 22467486-22469273 REVERSE |
| | LENGTH = 307 |
| 4699 | AT3G61160.2 Symbols: no symbol available: no full name available. Chr3: 22636209-22638593 |
| | FORWARD LENGTH = 438 |
| 4700 | AT3G61250.1 Symbols: LMI2, MYB17, AtMYB17: LATE MERISTEM IDENTITY2, myb domain |
| | protein 17. Chr3: 22671306-22672551 FORWARD LENGTH = 299 |
| 4701 | AT3G61310.1 Symbols: AHL11: AT-hook motif nuclear localized protein 11. Chr3: 22690799-22692445 |
| | REVERSE LENGTH = 354 |
| 4702 | AT3G61530.1 Symbols: PANB2.: Chr3: 22771692-22773313 REVERSE LENGTH = 354 |
| 4703 | AT3G61550.1 Symbols: no symbol available: no full name available. Chr3: 22776444-22777082 |
| | FORWARD LENGTH = 212 |
| 4704 | AT3G61590.1 Symbols: HS, HWS: HAWAIIAN SKIRT. Chr3: 22792914-22794149 FORWARD |
| | LENGTH = 411 |
| 4705 | AT3G61620.1 Symbols: RRP41.: Chr3: 22801382-22802910 REVERSE LENGTH = 241 |
| 4706 | AT3G61680.1 Symbols: no symbol available: no full name available. Chr3: 22824630-22826926 |
| | FORWARD LENGTH = 649 |
| 4707 | AT3G61830.1 Symbols: ARF18: auxin response factor 18. Chr3: 22888171-22891179 FORWARD |
| | LENGTH = 602 |
| 4708 | AT3G61850.4 Symbols: DAG1: dof affecting germination 1. Chr3: 22895495-22897150 FORWARD |
| | LENGTH = 324 |
| 4709 | AT3G62020.1 Symbols: GLP10: germin-like protein 10. Chr3: 22971443-22972192 REVERSE |
| | LENGTH = 220 |
| 4710 | AT3G62190.1 Symbols: no symbol available: no full name available. Chr3: 23021146-23022614 |
| | FORWARD LENGTH = 138 |
| 4711 | AT3G62270.1 Symbols: BOR2: REQUIRES HIGH BORON 2. Chr3: 23042528-23045633 REVERSE |
| | LENGTH = 703 |
| 4712 | AT3G62400.2 Symbols: no symbol available: no full name available. Chr3: 23090413-23090673 |
| | FORWARD LENGTH = 86 |
| 4713 | AT3G62420.1 Symbols: ATBZIP53, BZIP53: basic region/leucine zipper motif 53. Chr3: 23091844- |
| | 23092284 REVERSE LENGTH = 146 |
| 4714 | AT3G62660.1 Symbols: GATL7: galacturonosyltransferase-like 7. Chr3: 23173419-23174504 |
| | FORWARD LENGTH = 361 |
| 4715 | AT3G63050.1 Symbols: no symbol available: no full name available. Chr3: 23297950-23298372 |
| | REVERSE LENGTH = 140 |
| 4716 | AT3G63080.1 Symbols: MEE42, GPX5, ATGPX5: maternal effect embryo arrest 42, glutathione |
| | peroxidase 5. Chr3: 23310161-23311200 FORWARD LENGTH = 173 |
| 4717 | AT3G63130.1 Symbols: ATRANGAP1, RANGAP1: RAN GTPase activating protein 1, RAN GTPASE- |
| | ACTIVATING PROTEIN 1. Chr3: 23325108-23326715 FORWARD LENGTH = 535 |
| 4718 | AT3G63210.1 Symbols: MARD1: MEDIATOR OF ABA-REGULATED DORMANCY 1. |
| | Chr3: 23354019-23354906 REVERSE LENGTH = 263 |
| 4719 | AT3G63240.1 Symbols: no symbol available: no full name available. Chr3: 23364411-23366876 |
| | REVERSE LENGTH = 547 |
| 4720 | AT3G63250.1 Symbols: HMT-2, ATHMT-2, HMT2: homocysteine methyltransferase |
| | 2, HOMOCYSTEINE METHYLTRANSFERASE-2. Chr3: 23370575-23372587 REVERSE |
| | LENGTH = 333 |
| 4721 | AT3G63450.3 Symbols: no symbol available: no full name available. Chr3: 23427191-23428864 |
| | REVERSE LENGTH = 406 |
| 4722 | AT3G66654.1 Symbols: no symbol available: no full name available. Chr3: 2088694-2090297 |
| | FORWARD LENGTH = 236 |
| 4723 | AT4G00110.1 Symbols: GAE3: UDP-D-glucuronate 4-epimerase 3. Chr4: 38702-39994 REVERSE |
| | LENGTH = 430 |
| 4724 | AT4G00130.1 Symbols: no symbol available: no full name available. Chr4: 48414-49068 FORWARD |
| | LENGTH = 194 |
| 4725 | AT4G00180.1 Symbols: YAB3: YABBY3. Chr4: 72804-75089 REVERSE LENGTH = 240 |
| 4726 | AT4G00390.1 Symbols: no symbol available: no full name available. Chr4: 171650-172744 REVERSE |
| | LENGTH = 364 |
| 4727 | AT4G00440.2 Symbols: TRM15: TON1 Recruiting Motif 15. Chr4: 195176-198225 FORWARD |
| | LENGTH = 835 |
| 4728 | AT4G00500.1 Symbols: no symbol available: no full name available. Chr4: 225214-226978 REVERSE |
| | LENGTH = 460 |
| 4729 | AT4G00550.1 Symbols: DGD2: digalactosyl diacylglycerol deficient 2. Chr4: 238154-240019 |
| | REVERSE LENGTH = 473 |
| 4730 | AT4G00710.1 Symbols: BSK3: brassinosteroid-signaling kinase 3. Chr4: 290807-293096 FORWARD |
| | LENGTH = 489 |
| 4731 | AT4G00730.1 Symbols: AHDP, ANL2: ANTHOCYANINLESS 2, ARABIDOPSIS THALIANA |
| | HOMEODOMAIN PROTEIN. Chr4: 299741-304103 REVERSE LENGTH = 802 |
| 4732 | AT4G00955.1 Symbols: no symbol available: no full name available. Chr4: 412218-412976 FORWARD |
| | LENGTH = 252 |
| 4733 | AT4G01090.1 Symbols: no symbol available: no full name available. Chr4: 470834-473248 REVERSE |
| | LENGTH = 714 |
| 4734 | AT4G01210.1 Symbols: no symbol available: no full name available. Chr4: 507738-512362 REVERSE |
| | LENGTH = 1031 |
| 4735 | AT4G01290.1 Symbols: no symbol available: no full name available. Chr4: 538213-543282 REVERSE |
| | LENGTH = 991 |
| 4736 | AT4G02010.1 Symbols: no symbol available: no full name available. Chr4: 881457-885222 FORWARD |
| | LENGTH = 725 |
| 4737 | AT4G02140.1 Symbols: no symbol available: no full name available. Chr4: 949810-950240 REVERSE |
| | LENGTH = 112 |
| 4738 | AT4G02170.1 Symbols: no symbol available: no full name available. Chr4: 958126-958641 FORWARD |
| | LENGTH = 171 |
| 4739 | AT4G02550.3 Symbols: no symbol available: no full name available. Chr4: 1120622-1121674 |
| | REVERSE LENGTH = 322 |
| 4740 | AT4G02570.1 Symbols: ICU13, AXR6, ATCUL1, CUL1: cullin 1, AUXIN RESISTANT 6, INCURVATA |
| | 13. Chr4: 1129315-1133435 FORWARD LENGTH = 738 |
| 4741 | AT4G02710.1 Symbols: NET1C: Networked 1C. Chr4: 1193516-1197061 REVERSE LENGTH = 1111 |
| 4742 | AT4G02760.3 Symbols: no symbol available: no full name available. Chr4: 1224336-1227857 |
| | REVERSE LENGTH = 551 |
| 4743 | AT4G03000.1 Symbols: no symbol available: no full name available. Chr4: 1324602-1327348 |
| | FORWARD LENGTH = 814 |
| 4744 | AT4G03090.1 Symbols: NDX, AtNDX: Nodulin Homeobox. Chr4: 1366495-1370937 REVERSE |
| | LENGTH = 913 |
| 4745 | AT4G03200.1 Symbols: no symbol available: no full name available. Chr4: 1408296-1412566 |
| | FORWARD LENGTH = 818 |
| 4746 | AT4G03205.2 Symbols: hemf2.: Chr4: 1412814-1413703 FORWARD LENGTH = 240 |
| 4747 | AT4G03260.1 Symbols: no symbol available: no full name available. Chr4: 1429092-1431431 |
| | FORWARD LENGTH = 677 |
| 4748 | AT4G03280.1 Symbols: PGR1, PETC: PROTON GRADIENT REGULATION 1, photosynthetic electron |
| | transfer C. Chr4: 1440314-1441717 FORWARD LENGTH = 229 |
| 4749 | AT4G03410.2 Symbols: no symbol available: no full name available. Chr4: 1501907-1503503 |
| | FORWARD LENGTH = 361 |
| 4750 | AT4G03500.1 Symbols: no symbol available: no full name available. Chr4: 1553453-1556571 |
| | FORWARD LENGTH = 652 |
| 4751 | AT4G03510.1 Symbols: ATRMA1, RMA1: RING membrane-anchor 1. Chr4: 1557905-1558654 |
| | REVERSE LENGTH = 249 |
| 4752 | AT4G04340.2 Symbols: oscal: reduced hyperosmolality, induced Ca2+ increase 1 (oscal). |
| | Chr4: 2123235-2126624 FORWARD LENGTH = 772 |
| 4753 | AT4G04740.2 Symbols: CPK23, ATCPK23: calcium-dependent protein kinase 23. Chr4: 2404883- |
| | 2408493 REVERSE LENGTH = 533 |
| 4754 | AT4G04890.1 Symbols: PDF2: protodermal factor 2. Chr4: 2476970-2480090 REVERSE LENGTH = 743 |
| 4755 | AT4G06634.1 Symbols: AtYY1, YY1: Yin Yang 1. Chr4: 3764499-3766439 REVERSE LENGTH = 387 |
| 4756 | AT4G07990.1 Symbols: no symbol available: no full name available. Chr4: 4825650-4828937 |
| | REVERSE LENGTH = 230 |
| 4757 | AT4G08700.1 Symbols: PUP13, ATPUP13: purine permease 13. Chr4: 5565998-5567286 REVERSE |
| | LENGTH = 361 |
| 4758 | AT4G08980.1 Symbols: FBW2: F-BOX WITH WD-40 2. Chr4: 5758993-5760108 FORWARD |
| | LENGTH = 317 |
| 4759 | AT4G09640.1 Symbols: no symbol available: no full name available. Chr4: 6088433-6090604 |
| | REVERSE LENGTH = 386 |
| 4760 | AT4G10390.1 Symbols: no symbol available: no full name available. Chr4: 6441949-6443161 |
| | REVERSE LENGTH = 342 |
| 4761 | AT4G10955.1 Symbols: no symbol available: no full name available. Chr4: 6713778-6715372 |
| | REVERSE LENGTH = 350 |
| 4762 | AT4G11440.1 Symbols: no symbol available: no full name available. Chr4: 6955850-6958553 |
| | FORWARD LENGTH = 628 |
| 4763 | AT4G11450.1 Symbols: no symbol available: no full name available. Chr4: 6959065-6961223 |
| | REVERSE LENGTH = 694 |
| 4764 | AT4G11570.1 Symbols: no symbol available: no full name available. Chr4: 7004743-7005864 |
| | FORWARD LENGTH = 373 |
| 4765 | AT4G11800.1 Symbols: no symbol available: no full name available. Chr4: 7093666-7098519 |
| | REVERSE LENGTH = 1013 |
| 4766 | AT4G11830.2 Symbols: PLDGAMMA2: phospholipase D gamma 2. Chr4: 7115985-7119683 |
| | REVERSE LENGTH = 856 |
| 4767 | AT4G11960.1 Symbols: PGRL1B: PGR5-like B. Chr4: 7175340-7177709 REVERSE LENGTH = 313 |
| 4768 | AT4G12040.1 Symbols: AtSAP7, SAP7: stress-associated protein 7. Chr4: 7215341-7215868 |
| | FORWARD LENGTH = 175 |
| 4769 | AT4G12120.1 Symbols: SEC1B, ATSEC1B.: Chr4: 7256687-7260914 REVERSE LENGTH = 662 |
| 4770 | AT4G12420.1 Symbols: SKU5.: Chr4: 7349941-7352868 REVERSE LENGTH = 587 |
| 4771 | AT4G12750.1 Symbols: no symbol available: no full name available. Chr4: 7498009-7503920 |
| | REVERSE LENGTH = 1117 |
| 4772 | AT4G12990.1 Symbols: no symbol available: no full name available. Chr4: 7595044-7595334 |
| | REVERSE LENGTH = 96 |
| 4773 | AT4G13020.3 Symbols: MHK.: Chr4: 7604015-7606812 FORWARD LENGTH = 444 |
| 4774 | AT4G13100.2 Symbols: no symbol available: no full name available. Chr4: 7636547-7639037 |
| | REVERSE LENGTH = 265 |
| 4775 | AT4G13260.1 Symbols: AtYUC2, YUC2: YUCCA2. Chr4: 7721840-7723616 REVERSE LENGTH = 415 |
| 4776 | AT4G13345.1 Symbols: MEE55: maternal effect embryo arrest 55. Chr4: 7767292-7769426 FORWARD |
| | LENGTH = 394 |
| 4777 | AT4G13550.1 Symbols: no symbol available: no full name available. Chr4: 7871251-7876877 |
| | REVERSE LENGTH = 822 |
| 4778 | AT4G14350.1 Symbols: no symbol available: no full name available. Chr4: 8256449-8259934 |
| | REVERSE LENGTH = 551 |
| 4779 | AT4G14520.1 Symbols: no symbol available: no full name available. Chr4: 8342471-8343073 |
| | FORWARD LENGTH = 200 |
| 4780 | AT4G14620.1 Symbols: no symbol available: no full name available. Chr4: 8389246-8390448 |
| | REVERSE LENGTH = 341 |
| 4781 | AT4G14710.5 Symbols: ATARD2.: Chr4: 8424897-8426174 REVERSE LENGTH = 201 |
| 4782 | AT4G14850.1 Symbols: LOI1, MEF11: lovastatin insensitive 1, mitochondrial RNA editing factor 11. |
| | Chr4: 8513947-8516275 FORWARD LENGTH = 684 |
| 4783 | AT4G14880.1 Symbols: OASA1, OLD3, CYTACS1, ATCYS-3A: ONSET OF LEAF DEATH 3,O- |
| | acetylserine (thiol) lyase (OAS-TL) isoform A1. Chr4: 8518209-8520050 REVERSE LENGTH = 322 |
| 4784 | AT4G15010.1 Symbols: no symbol available: no full name available. Chr4: 8573125-8574864 |
| | REVERSE LENGTH = 378 |
| 4785 | AT4G15080.1 Symbols: no symbol available: no full name available. Chr4: 8609085-8612229 |
| | REVERSE LENGTH = 718 |
| 4786 | AT4G15530.5 Symbols: PPDK: pyruvate orthophosphate dikinase. Chr4: 8864828-8870748 REVERSE |
| | LENGTH = 963 |
| 4787 | AT4G16070.1 Symbols: no symbol available: no full name available. Chr4: 9096808-9100596 |
| | REVERSE LENGTH = 654 |
| 4788 | AT4G16280.2 Symbols: FCA.: Chr4: 9207164-9214412 REVERSE LENGTH = 747 |
| 4789 | AT4G16360.1 Symbols: KINbeta2: 5′-AMP-activated protein kinase beta-2 subunit, putative: |
| | Chr4: 9245571-9246833 FORWARD LENGTH = 289 |
| 4790 | AT4G16520.1 Symbols: ATG8F: autophagy 8f. Chr4: 9306882-9308113 REVERSE LENGTH = 121 |
| 4791 | AT4G16765.1 Symbols: no symbol available: no full name available. Chr4: 9429974-9431791 |
| | REVERSE LENGTH = 247 |
| 4792 | AT4G16845.1 Symbols: VRN2: REDUCED VERNALIZATION RESPONSE 2. Chr4: 9476708- |
| | 9479725 FORWARD LENGTH = 440 |
| 4793 | AT4G16940.1 Symbols: no symbol available: no full name available. Chr4: 9533149-9537510 |
| | REVERSE LENGTH = 1147 |
| 4794 | AT4G16990.2 Symbols: RLM3: RESISTANCE TO LEPTOSPHAERIA MACULANS 3. |
| | Chr4: 9560155-9565225 FORWARD LENGTH = 796 |
| 4795 | AT4G17020.3 Symbols: no symbol available: no full name available. Chr4: 9577973-9581082 |
| | REVERSE LENGTH = 482 |
| 4796 | AT4G17140.3 Symbols: no symbol available: no full name available. Chr4: 9613617-9636618 |
| | REVERSE LENGTH = 4219 |
| 4797 | AT4G17410.3 Symbols: no symbol available: no full name available. Chr4: 9716360-9721642 |
| | FORWARD LENGTH = 827 |
| 4798 | AT4G18020.1 Symbols: PRR2, APRR2: PSEUDO-RESPONSE REGULATOR 2. Chr4: 10003738- |
| | 10006682 REVERSE LENGTH = 535 |
| 4799 | AT4G18880.1 Symbols: AT-HSFA4A, HSF A4A: heat shock transcription factor A4A, ARABIDOPSIS |
| | THALIANA HEAT SHOCK TRANSCRIPTION FACTOR A4A. Chr4: 10347769-10349051 REVERSE |
| | LENGTH = 401 |
| 4800 | AT4G19110.2 Symbols: no symbol available: no full name available. Chr4: 10454770-10457468 |
| | REVERSE LENGTH = 464 |
| 4801 | AT4G19160.2 Symbols: no symbol available: no full name available. Chr4: 10477772-10479947 |
| | FORWARD LENGTH = 453 |
| 4802 | AT4G19550.2 Symbols: no symbol available: no full name available. Chr4: 10659414-10660873 |
| | REVERSE LENGTH = 223 |
| 4803 | AT4G19645.1 Symbols: no symbol available: no full name available. Chr4: 10689941-10691298 |
| | REVERSE LENGTH = 268 |
| 4804 | AT4G20325.1 Symbols: no symbol available: no full name available. Chr4: 10980124-10982426 |
| | FORWARD LENGTH = 277 |
| 4805 | AT4G21060.1 Symbols: AtGALT2, GALT2: AGP galactosyltransferase 2. Chr4: 11240730-11244860 |
| | FORWARD LENGTH = 741 |
| 4806 | AT4G21270.1 Symbols: KATA, KATAP, ATK1: KINESIN-LIKE PROTEIN IN ARABIDOPSIS |
| | THALIANA A, KINESIN-LIKE PROTEIN IN ARABIDOPSIS THALIANA A PROTEIN, kinesin 1. |
| | Chr4: 11329579-11333884 REVERSE LENGTH = 793 |
| 4807 | AT4G21720.1 Symbols: no symbol available: no full name available. Chr4: 11542561-11544274 |
| | FORWARD LENGTH = 139 |
| 4808 | AT4G21750.1 Symbols: ATML1: MERISTEM LAYER 1. Chr4: 11556965-11560243 FORWARD |
| | LENGTH = 762 |
| 4809 | AT4G21850.1 Symbols: MSRB9, ATMSRB9: methionine sulfoxide reductase B9. Chr4: 11591378- |
| | 11592138 REVERSE LENGTH = 143 |
| 4810 | AT4G22140.1 Symbols: EBS: EARLY BOLTING IN SHORT DAYS. Chr4: 11728556-11730230 |
| | REVERSE LENGTH = 234 |
| 4811 | AT4G22150.1 Symbols: PUX3: plant UBX domain-containing protein 3. Chr4: 11731272-11732605 |
| | REVERSE LENGTH = 302 |
| 4812 | AT4G22285.1 Symbols: no symbol available: no full name available. Chr4: 11779063-11781898 |
| | REVERSE LENGTH = 541 |
| 4813 | AT4G22305.1 Symbols: no symbol available: no full name available. Chr4: 11789546-11791055 |
| | REVERSE LENGTH = 228 |
| 4814 | AT4G22810.1 Symbols: AHL24: AT-hook motif nuclear localized protein 24. Chr4: 11984432-11985406 |
| | FORWARD LENGTH = 324 |
| 4815 | AT4G22860.1 Symbols: no symbol available: no full name available. Chr4: 11997735-12001281 |
| | FORWARD LENGTH = 509 |
| 4816 | AT4G22970.1 Symbols: RSW4, ESP, AESP: EXTRA SPINDLE POLES, RADIALLY SWOLLEN |
| | 4, homolog of separase. Chr4: 12033703-12043572 REVERSE LENGTH = 2180 |
| 4817 | AT4G22990.2 Symbols: PHT5 3: Chr4: 12048240-12050984 REVERSE LENGTH = 700 |
| 4818 | AT4G23000.1 Symbols: no symbol available: no full name available. Chr4: 12055241-12059647 |
| | FORWARD LENGTH = 919 |
| 4819 | AT4G23020.2 Symbols: TRM11: TON1 Recruiting Motif 11. Chr4: 12066331-12068442 REVERSE |
| | LENGTH = 452 |
| 4820 | AT4G23420.3 Symbols: no symbol available: no full name available. Chr4: 12226060-12228562 |
| | FORWARD LENGTH = 333 |
| 4821 | AT4G23470.1 Symbols: no symbol available: no full name available. Chr4: 12249289-12251079 |
| | FORWARD LENGTH = 255 |
| 4822 | AT4G23740.1 Symbols: no symbol available: no full name available. Chr4: 12367063-12369159 |
| | FORWARD LENGTH = 638 |
| 4823 | AT4G23770.1 Symbols: no symbol available: no full name available. Chr4: 12383514-12384050 |
| | REVERSE LENGTH = 138 |
| 4824 | AT4G23860.1 Symbols: no symbol available: no full name available. Chr4: 12409336-12411336 |
| | FORWARD LENGTH = 452 |
| 4825 | AT4G24480.1 Symbols: no symbol available: no full name available. Chr4: 12650410-12654755 |
| | FORWARD LENGTH = 956 |
| 4826 | AT4G24670.1 Symbols: TAR2: tryptophan aminotransferase related 2. Chr4: 12727940-12730694 |
| | REVERSE LENGTH = 440 |
| 4827 | AT4G24960.1 Symbols: HVA22D, ATHVA22D: ARABIDOPSIS THALIANA HVA22 HOMOLOGUE |
| | D, HVA22 homologue D. Chr4: 12828060-12828982 FORWARD LENGTH = 135 |
| 4828 | AT4G25100.1 Symbols: FSD1, ATFSDI: ARABIDOPSIS FE SUPEROXIDE DISMUTASE 1, Fe |
| | superoxide dismutase 1. Chr4: 12884649-12886501 REVERSE LENGTH = 212 |
| 4829 | AT4G25320.1 Symbols: AHL3: AT-HOOK MOTIF NUCLEAR LOCALIZED PROTEIN 3. |
| | Chr4: 12954488-12956342 FORWARD LENGTH = 404 |
| 4830 | AT4G25390.1 Symbols: no symbol available: no full name available. Chr4: 12977491-12979446 |
| | FORWARD LENGTH = 651 |
| 4831 | AT4G25670.1 Symbols: no symbol available: no full name available. Chr4: 13085431-13085997 |
| | REVERSE LENGTH = 188 |
| 4832 | AT4G25690.1 Symbols: no symbol available: no full name available. Chr4: 13090421-13090996 |
| | REVERSE LENGTH = 191 |
| 4833 | AT4G26100.1 Symbols: CKL1, CK1: casein kinase 1. Chr4: 13227885-13230508 REVERSE |
| | LENGTH = 450 |
| 4834 | AT4G26270.1 Symbols: PFK3: phosphofructokinase 3. Chr4: 13301094-13304030 REVERSE |
| | LENGTH = 489 |
| 4835 | AT4G26320.1 Symbols: AGP13: arabinogalactan protein 13. Chr4: 13317235-13317414 REVERSE |
| | LENGTH = 59 |
| 4836 | AT4G26520.1 Symbols: FBA7, AtFBA7: fructose-bisphosphate aldolase 7. Chr4: 13388676-13390191 |
| | FORWARD LENGTH = 358 |
| 4837 | AT4G26650.1 Symbols: no symbol available: no full name available. Chr4: 13445552-13447592 |
| | FORWARD LENGTH = 455 |
| 4838 | AT4G26850.1 Symbols: GGP, VTC2: vitamin c defective 2, GDP-1-galactose phosphorylase. |
| | Chr4: 13499262-13501145 REVERSE LENGTH = 442 |
| 4839 | AT4G27010.2 Symbols: EMB2788: EMBRYO DEFECTIVE 2788. Chr4: 13558129-13568296 |
| | FORWARD LENGTH = 2574 |
| 4840 | AT4G27040.1 Symbols: VPS22.: Chr4: 13573061-13574576 REVERSE LENGTH = 250 |
| 4841 | AT4G27050.1 Symbols: no symbol available: no full name available. Chr4: 13575884-13577429 |
| | REVERSE LENGTH = 453 |
| 4842 | AT4G27080.2 Symbols: PDIL5-4, ATPDI7, PDI7, ATPDIL5-4: PDI-like 5-4, PROTEIN DISULFIDE |
| | ISOMERASE 7, ARABIDOPSIS THALIANA PROTEIN DISULFIDE ISOMERASE 7. Chr4: 13589156- |
| | 13593335 FORWARD LENGTH = 532 |
| 4843 | AT4G27610.1 Symbols: no symbol available: no full name available. Chr4: 13785648-13787332 |
| | REVERSE LENGTH = 334 |
| 4844 | AT4G27840.1 Symbols: no symbol available: no full name available. Chr4: 13865268-13866050 |
| | REVERSE LENGTH = 260 |
| 4845 | AT4G28040.1 Symbols: UMAMIT33: Usually multiple acids move in and out Transporters 33. |
| | Chr4: 13940881-13942201 FORWARD LENGTH = 359 |
| 4846 | AT4G28260.1 Symbols: no symbol available: no full name available. Chr4: 14005048-14006762 |
| | FORWARD LENGTH = 516 |
| 4847 | AT4G28300.1 Symbols: no symbol available: no full name available. Chr4: 14014860-14016823 |
| | FORWARD LENGTH = 496 |
| 4848 | AT4G28480.1 Symbols: no symbol available: no full name available. Chr4: 14073310-14075091 |
| | FORWARD LENGTH = 348 |
| 4849 | AT4G29160.1 Symbols: SNF7.1.: Chr4: 14381019-14382342 FORWARD LENGTH = 219 |
| 4850 | AT4G30020.1 Symbols: no symbol available: no full name available. Chr4: 14678251-14681762 |
| | FORWARD LENGTH = 816 |
| 4851 | AT4G30160.2 Symbols: ATVLN4, VLN4: villin 4. Chr4: 14754528-14759511 FORWARD |
| | LENGTH-983 |
| 4852 | AT4G30630.1 Symbols: no symbol available: no full name available. Chr4: 14951048-14952159 |
| | FORWARD LENGTH = 237 |
| 4853 | AT4G30710.1 Symbols: QWRF8, AUG8: QWRF domain containing 8, augmin subunit 8. |
| | Chr4: 14965538-14967881 REVERSE LENGTH-644 |
| 4854 | AT4G30900.1 Symbols: no symbol available: no full name available. Chr4: 15040021-15042203 |
| | FORWARD LENGTH = 316 |
| 4855 | AT4G30960.1 Symbols: ATCIPK6, CIPK6, SNRK3.14, SIP3: SNF1-RELATED PROTEIN KINASE |
| | 3.14, SOS3-interacting protein 3, CBL-INTERACTING PROTEIN KINASE 6. Chr4: 15067400-15068725 |
| | FORWARD LENGTH = 441 |
| 4856 | AT4G31820.1 Symbols: ENP, MAB4, NPY1: MACCHI-BOU 4, NAKED PINS IN YUC MUTANTS |
| | 1, ENHANCER OF PINOID. Chr4: 15390788-15393627 REVERSE LENGTH = 571 |
| 4857 | AT4G31880.1 Symbols: AtPDS5C, PDS5C.: Chr4: 15419435-15423939 REVERSE LENGTH = 873 |
| 4858 | AT4G31990.3 Symbols: AAT3, ATAAT1, ASP5: aspartate aminotransferase 5, ASPARTATE |
| | AMINOTRANSFERASE DEFICIENT 3. Chr4: 15470876-15473521 REVERSE LENGTH = 462 |
| 4859 | AT4G32300.1 Symbols: SD2-5: S-domain-2 5. Chr4: 15599970-15602435 FORWARD LENGTH = 821 |
| 4860 | AT4G32850.8 Symbols: nPAP, PAP(IV), PAPS4: poly(A) polymerase 4, poly(A) polymerase IV, nuclear |
| | poly(a) polymerase. Chr4: 15850134-15854443 FORWARD LENGTH = 765 |
| 4861 | AT4G32980.1 Symbols: ATH1: homeobox gene 1. Chr4: 15914865-15916873 REVERSE |
| | LENGTH = 473 |
| 4862 | AT4G33050.2 Symbols: AtIQM1, IQM1, EDA39: IQ-motif protein 1, embryo sac development arrest 39. |
| | Chr4: 15944604-15946736 REVERSE LENGTH = 526 |
| 4863 | AT4G33160.1 Symbols: no symbol available: no full name available. Chr4: 15994160-15995533 |
| | FORWARD LENGTH = 457 |
| 4864 | AT4G33240.1 Symbols: FAB1A: FORMS APLOID AND BINUCLEATE CELLS 1A. Chr4: 16029504- |
| | 16037278 REVERSE LENGTH = 1757 |
| 4865 | AT4G33950.1 Symbols: SNRK2.6, SRK2E, ATOST1, P44, SNRK2-6, OST1: SNF1-RELATED PROTEIN |
| | KINASE 2.6, OPEN STOMATA 1, SUCROSE NONFERMENTING 1-RELATED PROTEIN KINASE 2- |
| | 6. Chr4: 16272364-16274657 FORWARD LENGTH = 362 |
| 4866 | AT4G34160.1 Symbols: CYCD3, CYCD3_1: CYCLIN D3_1. Chr4: 16357903-16359304 FORWARD |
| | LENGTH = 376 |
| 4867 | AT4G34420.1 Symbols: no symbol available: no full name available. Chr4: 16458430-16460526 |
| | FORWARD LENGTH = 342 |
| 4868 | AT4G34460.1 Symbols: ELK4, ATAGB1, AGB1: GTP binding protein beta 1, ERECTA-LIKE 4. |
| | Chr4: 16477393-16479266 REVERSE LENGTH = 377 |
| 4869 | AT4G34540.1 Symbols: no symbol available: no full name available. Chr4: 16500506-16501932 |
| | FORWARD LENGTH = 306 |
| 4870 | AT4G34560.1 Symbols: no symbol available: no full name available. Chr4: 16507923-16508588 |
| | FORWARD LENGTH = 221 |
| 4871 | AT4G34590.1 Symbols: BZIP11, ATB2, GBF6, AtbZIP11: Arabidopsis thaliana basic leucine-zipper 11, G- |
| | box binding factor 6. Chr4: 16522449-16522928 FORWARD LENGTH = 159 |
| 4872 | AT4G34710.1 Symbols: SPE2, ADC2, ATADC2: arginine decarboxylase 2. Chr4: 16560315-16562450 |
| | REVERSE LENGTH = 711 |
| 4873 | AT4G34881.1 Symbols: no symbol available: no full name available. Chr4: 16617892-16618071 |
| | FORWARD LENGTH = 59 |
| 4874 | AT4G35020.1 Symbols: ARAC3, ATROP6, RHO1PS, RAC3, ROP6: RHO-RELATED PROTEIN FROM |
| | PLANTS 6, RAC-like 3. Chr4: 16673176-16674540 FORWARD LENGTH = 198 |
| 4875 | AT4G35040.1 Symbols: bZIP19.: Chr4: 16680821-16681805 FORWARD LENGTH = 261 |
| 4876 | AT4G35390.1 Symbols: AGF1, AHL25: AT-hook motif nuclear localized protein 25, AT-hook protein of |
| | GA feedback 1. Chr4: 16829603-16830502 FORWARD LENGTH = 299 |
| 4877 | AT4G35470.1 Symbols: PIRL4: plant intracellular ras group-related LRR 4. Chr4: 16846531-16848448 |
| | FORWARD LENGTH = 549 |
| 4878 | AT4G35860.1 Symbols: ATRABB1B, ATGB2, ATRAB2C, GB2: GTP-binding 2. Chr4: 16987118- |
| | 16988839 REVERSE LENGTH = 211 |
| 4879 | AT4G35920.1 Symbols: MCAL: mid1-complementing activity 1. Chr4: 17012106-17014192 REVERSE |
| | LENGTH = 421 |
| 4880 | AT4G35940.1 Symbols: no symbol available: no full name available. Chr4: 17021672-17023593 |
| | FORWARD LENGTH = 451 |
| 4881 | AT4G36050.2 Symbols: no symbol available: no full name available. Chr4: 17052323-17055044 |
| | REVERSE LENGTH = 610 |
| 4882 | AT4G36090.3 Symbols: no symbol available: no full name available. Chr4: 17078376-17080670 |
| | REVERSE LENGTH = 520 |
| 4883 | AT4G36620.1 Symbols: GATA19, HANL2: GATA transcription factor 19, hanaba taranu like 2. |
| | Chr4: 17268906-17269662 REVERSE LENGTH = 211 |
| 4884 | AT4G36840.1 Symbols: no symbol available: no full name available. Chr4: 17352166-17352882 |
| | FORWARD LENGTH = 238 |
| 4885 | AT4G36960.1 Symbols: no symbol available: no full name available. Chr4: 17427349-17429589 |
| | FORWARD LENGTH = 379 |
| 4886 | AT4G37080.2 Symbols: no symbol available: no full name available. Chr4: 17473719-17476716 |
| | FORWARD LENGTH = 610 |
| 4887 | AT4G37590.1 Symbols: MEL1, NPY5: MAB4/ENP/NPY1-LIKE 1, NAKED PINS IN YUC MUTANTS |
| | 5. Chr4: 17663080-17665299 REVERSE LENGTH = 580 |
| 4888 | AT4G37608.1 Symbols: no symbol available: no full name available. Chr4: 17669825-17670429 |
| | FORWARD LENGTH = 87 |
| 4889 | AT4G37690.1 Symbols: no symbol available: no full name available. Chr4: 17708303-17709601 |
| | FORWARD LENGTH = 432 |
| 4890 | AT4G37750.1 Symbols: ANT, CKC1, DRG, CKC, AtANT: COMPLEMENTING A PROTEIN KINASE C |
| | MUTANT 1, AINTEGUMENTA, DRAGON. Chr4: 17739782-17742189 FORWARD LENGTH = 555 |
| 4891 | AT4G38260.1 Symbols: no symbol available: no full name available. Chr4: 17937077-17938210 |
| | REVERSE LENGTH = 275 |
| 4892 | AT4G38330.1 Symbols: no symbol available: no full name available. Chr4: 17952294-17952540 |
| | FORWARD LENGTH = 47 |
| 4893 | AT4G38520.1 Symbols: APD6: Arabidopsis Pp2c clade D 6. Chr4: 18015999-18017514 REVERSE |
| | LENGTH = 400 |
| 4894 | AT4G38950.1 Symbols: no symbol available: no full name available. Chr4: 18154606-18158461 |
| | REVERSE LENGTH = 836 |
| 4895 | AT4G38960.3 Symbols: BBX19: B-box domain protein 19. Chr4: 18161576-18163045 FORWARD |
| | LENGTH = 226 |
| 4896 | AT4G39050.1 Symbols: Kin7.4: kinesin 7.4. Chr4: 18193462-18200148 FORWARD LENGTH = 1055 |
| 4897 | AT4G39180.1 Symbols: ATSEC14, SEC14: SECRETION 14, ARABIDOPSIS THALIANA SECRETION |
| | 14. Chr4: 18244006-18246673 REVERSE LENGTH = 554 |
| 4898 | AT4G39190.1 Symbols: no symbol available: no full name available. Chr4: 18252032-18252865 |
| | REVERSE LENGTH = 277 |
| 4899 | AT4G39270.1 Symbols: no symbol available: no full name available. Chr4: 18276874-18279710 |
| | FORWARD LENGTH = 864 |
| 4900 | AT4G39390.1 Symbols: NST-K1, ATNST-KT1, URGT4: UDP-Rha/UDP-Gal transporter 4, nucleotide |
| | sugar transporter-KT 1, A. THALIANA NUCLEOTIDE SUGAR TRANSPORTER-KT 1. |
| | Chr4: 18316278-18317854 FORWARD LENGTH = 337 |
| 4901 | AT4G39420.2 Symbols: no symbol available: no full name available. Chr4: 18339731-18354701 |
| | FORWARD LENGTH = 3184 |
| 4902 | AT4G39680.1 Symbols: no symbol available: no full name available. Chr4: 18414604-18416938 |
| | REVERSE LENGTH = 633 |
| 4903 | AT4G40030.2 Symbols: H3.3, HTR4: histone 3.3. Chr4: 18555840-18556827 REVERSE LENGTH = 164 |
| 4904 | AT4G40040.1 Symbols: H3.3, HTR5: histone 3.3. Chr4: 18557539-18558236 REVERSE LENGTH = 136 |
| 4905 | AT5G01100.1 Symbols: FRB1: FRIABLE 1. Chr5: 34872-37756 REVERSE LENGTH = 631 |
| 4906 | AT5G01300.1 Symbols: no symbol available: no full name available. Chr5: 121643-122448 REVERSE |
| | LENGTH = 162 |
| 4907 | AT5G01380.1 Symbols: no symbol available: no full name available. Chr5: 155784-157451 REVERSE |
| | LENGTH = 323 |
| 4908 | AT5G01520.1 Symbols: AtAIRP2, AIRP2: ABA Insensitive RING Protein 2. Chr5: 206797-208399 |
| | FORWARD LENGTH = 242 |
| 4909 | AT5G01710.1 Symbols: no symbol available: no full name available. Chr5: 263709-265250 REVERSE |
| | LENGTH = 513 |
| 4910 | AT5G01810.1 Symbols: ATPK10, SNRK3.1, CIPK15, SIP2, PKS3: SNF1-RELATED PROTEIN KINASE |
| | 3.1, PROTEIN KINASE 10, SOS3-INTERACTING PROTEIN 2, CBL-interacting protein kinase 15. |
| | Chr5: 310460-311725 FORWARD LENGTH = 421 |
| 4911 | AT5G01830.1 Symbols: no symbol available: no full name available. Chr5: 320983-323007 FORWARD |
| | LENGTH = 674 |
| 4912 | AT5G02060.1 Symbols: CASPL5B1: CASP-like protein 5B1. Chr5: 404908-405774 FORWARD |
| | LENGTH = 152 |
| 4913 | AT5G02480.1 Symbols: no symbol available: no full name available. Chr5: 548152-549678 FORWARD |
| | LENGTH = 508 |
| 4914 | AT5G02550.1 Symbols: no symbol available: no full name available. Chr5: 573247-573477 REVERSE |
| | LENGTH = 76 |
| 4915 | AT5G02650.1 Symbols: no symbol available: no full name available. Chr5: 598276-599786 FORWARD |
| | LENGTH = 226 |
| 4916 | AT5G02680.1 Symbols: no symbol available: no full name available. Chr5: 606065-607884 FORWARD |
| | LENGTH = 133 |
| 4917 | AT5G03190.2 Symbols: CPUORF47: conserved peptide upstream open reading frame 47. Chr5: 758539- |
| | 760148 FORWARD LENGTH = 475 |
| 4918 | AT5G03240.1 Symbols: UBQ3: polyubiquitin 3. Chr5: 771976-772896 REVERSE LENGTH = 306 |
| 4919 | AT5G03280.1 Symbols: EIN2, CKR1, ATEIN2, ERA3, PIR2, ORE2, ORE3: ENHANCED RESPONSE TO |
| | ABA3, CYTOKININ RESISTANT 1, ORESARA 2, ETHYLENE INSENSITIVE 2, ORESARA 3. |
| | Chr5: 788589-793066 FORWARD LENGTH = 1294 |
| 4920 | AT5G03330.1 Symbols: no symbol available: no full name available. Chr5: 807728-809608 FORWARD |
| | LENGTH = 356 |
| 4921 | AT5G03500.1 Symbols: MED7B: MED7B. Chr5: 876673-877660 REVERSE LENGTH = 168 |
| 4922 | AT5G03540.3 Symbols: ATEXO70A1, EXO70A1: exocyst subunit exo70 family protein A1. |
| | Chr5: 889606-893916 FORWARD LENGTH = 664 |
| 4923 | AT5G03795.1 Symbols: no symbol available: no full name available. Chr5: 1007554-1010373 |
| | REVERSE LENGTH = 518 |
| 4924 | AT5G03990.1 Symbols: no symbol available: no full name available. Chr5: 1075957-1077358 |
| | FORWARD LENGTH = 302 |
| 4925 | AT5G04220.2 Symbols: NTMC2TYPE1.3, NTMC2T1.3, ATSYTC, SYT3, SYTC: synaptotagmin 3. |
| | Chr5: 1155985-1158620 REVERSE LENGTH = 540 |
| 4926 | AT5G04320.2 Symbols: SGO2, AtSGO2: SHUGOSHIN 2. Chr5: 1209613-1212376 FORWARD |
| | LENGTH = 470 |
| 4927 | AT5G04480.1 Symbols: BUP: Bursting pollen. Chr5: 1271886-1277793 REVERSE LENGTH = 1050 |
| 4928 | AT5G04920.1 Symbols: no symbol available: no full name available. Chr5: 1439172-1441545 |
| | REVERSE LENGTH = 440 |
| 4929 | AT5G04940.1 Symbols: SUVH1: SU(VAR)3-9 homolog 1. Chr5: 1454616-1456628 REVERSE |
| | LENGTH = 670 |
| 4930 | AT5G05210.1 Symbols: no symbol available: no full name available. Chr5: 1548198-1549534 |
| | FORWARD LENGTH = 386 |
| 4931 | AT5G05350.1 Symbols: no symbol available: no full name available. Chr5: 1585757-1587337 |
| | FORWARD LENGTH = 526 |
| 4932 | AT5G05930.1 Symbols: GC1, ATGC1: ARABIDOPSIS GUANYLYL CYCLASE 1, guanylyl cyclase 1. |
| | Chr5: 1780270-1782659 REVERSE LENGTH = 274 |
| 4933 | AT5G06100.2 Symbols: ATMYB33, MYB33: myb domain protein 33. Chr5: 1838555-1840386 |
| | FORWARD LENGTH = 520 |
| 4934 | AT5G06130.2 Symbols: AtOR-like: Arabidopsis thaliana orange-like. Chr5: 1853754-1855763 |
| | REVERSE LENGTH = 315 |
| 4935 | AT5G06265.1 Symbols: no symbol available: no full name available. Chr5: 1906596-1907382 |
| | FORWARD LENGTH = 106 |
| 4936 | AT5G06420.1 Symbols: no symbol available: no full name available. Chr5: 1961521-1962870 |
| | FORWARD LENGTH = 378 |
| 4937 | AT5G06750.1 Symbols: APD8: Arabidopsis Pp2c clade D 8. Chr5: 2086403-2088245 REVERSE |
| | LENGTH = 393 |
| 4938 | AT5G06839.3 Symbols: bZIP65, TGA10: TGACG (TGA) motif-binding protein 10. Chr5: 2120911- |
| | 2126217 FORWARD LENGTH = 460 |
| 4939 | AT5G07370.2 Symbols: IPK2a, IMPK, ATIPK2A: inositol polyphosphate kinase 2 alpha, inositol multi- |
| | phosphate kinase, INOSITOL POLYPHOSPHATE KINASE 2 ALPHA. Chr5: 2331251-2332111 |
| | FORWARD LENGTH = 286 |
| 4940 | AT5G07790.1 Symbols: no symbol available: no full name available. Chr5: 2484073-2486107 |
| | FORWARD LENGTH = 616 |
| 4941 | AT5G07840.1 Symbols: PIA1: phytochrome interacting ankyrin-repeat protein 1. Chr5: 2506764- |
| | 2507291 REVERSE LENGTH = 175 |
| 4942 | AT5G07890.1 Symbols: no symbol available: no full name available. Chr5: 2517718-2519493 |
| | REVERSE LENGTH = 409 |
| 4943 | AT5G07920.1 Symbols: ATDGK1, DGK1: diacylglycerol kinase1, DIACYLGLYCEROL KINASE 1. |
| | Chr5: 2525197-2528396 REVERSE LENGTH = 728 |
| 4944 | AT5G08100.1 Symbols: ASPGA1: asparaginase A1. Chr5: 2593242-2594586 REVERSE LENGTH = 315 |
| 4945 | AT5G08130.5 Symbols: BIM1.: Chr5: 2606655-2609571 REVERSE LENGTH = 532 |
| 4946 | AT5G08560.1 Symbols: WDR26, ATWDR26: WD-40 repeat 26. Chr5: 2771104-2773827 REVERSE |
| | LENGTH = 589 |
| 4947 | AT5G09350.1 Symbols: PI-4KBETA2, PI4KBETA2: phosphatidylinositol 4-OH kinase |
| | beta2, PHOSPHATIDYLINOSITOL 4-OH KINASE BETA2. Chr5: 2899365-2905610 REVERSE |
| | LENGTH = 1116 |
| 4948 | AT5G09460.1 Symbols: no symbol available: no full name available. Chr5: 2944437-2945417 |
| | REVERSE LENGTH = 326 |
| 4949 | AT5G09600.1 Symbols: SDH3-1: succinate dehydrogenase 3-1. Chr5: 2979220-2980527 FORWARD |
| | LENGTH = 213 |
| 4950 | AT5G09630.1 Symbols: no symbol available: no full name available. Chr5: 2986016-2987176 |
| | REVERSE LENGTH = 386 |
| 4951 | AT5G09670.2 Symbols: no symbol available: no full name available. Chr5: 2996109-2997749 |
| | REVERSE LENGTH = 546 |
| 4952 | AT5G09680.1 Symbols: RLF: reduced lateral root formation. Chr5: 2999362-3000185 REVERSE |
| | LENGTH = 211 |
| 4953 | AT5G09850.1 Symbols: no symbol available: no full name available. Chr5: 3063488-3065221 |
| | REVERSE LENGTH = 353 |
| 4954 | AT5G10030.1 Symbols: TGA4, OBF4: TGACG motif-binding factor 4, OCS ELEMENT BINDING |
| | FACTOR 4. Chr5: 3137648-3139295 REVERSE LENGTH = 364 |
| 4955 | AT5G10510.3 Symbols: AIL6, PLT3: PLETHORA 3, AINTEGUMENTA-like 6. Chr5: 3315991-3320008 |
| | FORWARD LENGTH = 604 |
| 4956 | AT5G11150.1 Symbols: VAMP713, ATVAMP713: vesicle-associated membrane protein 713. |
| | Chr5: 3546625-3547844 REVERSE LENGTH = 221 |
| 4957 | AT5G11730.1 Symbols: no symbol available: no full name available. Chr5: 3780963-3782473 |
| | FORWARD LENGTH = 386 |
| 4958 | AT5G11860.1 Symbols: SSP5: SCP1-like small phosphatase 5. Chr5: 3822024-3823395 REVERSE |
| | LENGTH = 305 |
| 4959 | AT5G12440.1 Symbols: no symbol available: no full name available. Chr5: 4035891-4038604 |
| | REVERSE LENGTH = 650 |
| 4960 | AT5G12480.1 Symbols: CPK7: calmodulin-domain protein kinase 7. Chr5: 4047817-4050035 REVERSE |
| | LENGTH = 535 |
| 4961 | AT5G12840.1 Symbols: NF-YA1, EMB2220, HAP2A, NFYA1, AtNFYA1, ATHAP2A: “nuclear factor Y, |
| | subunit A1”, nuclear factor Y subunit A1, EMBRYO DEFECTIVE 2220. Chr5: 4051147-4052961 |
| | REVERSE LENGTH = 272 |
| 4962 | AT5G13290.2 Symbols: SOL2, CRN: SUPPRESSOR OF LLP1 2, CORYNE. Chr5: 4252924-4254215 |
| | REVERSE LENGTH = 401 |
| 4963 | AT5G13660.2 Symbols: no symbol available: no full name available. Chr5: 4405094-4406983 |
| | FORWARD LENGTH = 537 |
| 4964 | AT5G13840.1 Symbols: CCS52B, FZR3: FIZZY-related 3, cell cycle switch protein 52 B. Chr5: 4468677- |
| | 4470706 REVERSE LENGTH = 481 |
| 4965 | AT5G14310.1 Symbols: AtCXE16, CXE16: carboxyesterase 16. Chr5: 4615592-4617422 FORWARD |
| | LENGTH = 446 |
| 4966 | AT5G14720.1 Symbols: no symbol available: no full name available. Chr5: 4748212-4752642 |
| | REVERSE LENGTH = 674 |
| 4967 | AT5G14740.1 Symbols: BETA CA2, CA2, CA18: BETA CARBONIC ANHYDRASE 2, CARBONIC |
| | ANHYDRASE 18, carbonic anhydrase 2. Chr5: 4758257-4762382 FORWARD LENGTH = 331 |
| 4968 | AT5G15020.1 Symbols: SNL2: SIN3-like 2. Chr5: 4859408-4865569 REVERSE LENGTH = 1367 |
| 4969 | AT5G15260.1 Symbols: no symbol available: no full name available. Chr5: 4953646-4954350 |
| | REVERSE LENGTH = 234 |
| 4970 | AT5G15320.1 Symbols: no symbol available: no full name available. Chr5: 4977647-4978658 |
| | FORWARD LENGTH = 53 |
| 4971 | AT5G15400.1 Symbols: MUSE3: Mutant, snc1 -enhancing 3. Chr5: 4997764-5002907 REVERSE |
| | LENGTH = 1038 |
| 4972 | AT5G15580.1 Symbols: TRM2, LNG1: LONGIFOLIAI, TONI Recruiting Motif 2. Chr5: 5068495- |
| | 5071930 REVERSE LENGTH = 927 |
| 4973 | AT5G15790.1 Symbols: no symbol available: no full name available. Chr5: 5149800-5150964 |
| | FORWARD LENGTH = 232 |
| 4974 | AT5G15950.1 Symbols: no symbol available: no full name available. Chr5: 5206706-5207794 |
| | FORWARD LENGTH = 362 |
| 4975 | AT5G16140.1 Symbols: no symbol available: no full name available. Chr5: 5270308-5271517 |
| | REVERSE LENGTH = 240 |
| 4976 | AT5G16280.1 Symbols: no symbol available: no full name available. Chr5: 5323377-5331345 |
| | REVERSE LENGTH = 1272 |
| 4977 | AT5G16510.1 Symbols: RGP5: reversibly glycosylated polypeptide 5, reversibly glycosylated protein 5. |
| | Chr5: 5393296-5394342 FORWARD LENGTH = 348 |
| 4978 | AT5G16610.2 Symbols: no symbol available: no full name available. Chr5: 5445068-5447945 |
| | REVERSE LENGTH = 673 |
| 4979 | AT5G17460.2 Symbols: no symbol available: no full name available. Chr5: 5757582-5758867 |
| | REVERSE LENGTH = 309 |
| 4980 | AT5G18590.1 Symbols: no symbol available: no full name available. Chr5: 6178516-6182186 |
| | REVERSE LENGTH = 708 |
| 4981 | AT5G18690.1 Symbols: ATAGP25, AGP25: arabinogalactan protein 25, ARABIDOPSIS THALIANA |
| | ARABINOGALACTAN PROTEINS 25. Chr5: 6233776-6234126 REVERSE LENGTH = 116 |
| 4982 | AT5G18860.1 Symbols: NSH3: nucleoside hydrolase 3. Chr5: 6291023-6295581 FORWARD |
| | LENGTH = 890 |
| 4983 | AT5G19420.2 Symbols: no symbol available: no full name available. Chr5: 6547945-6552981 |
| | REVERSE LENGTH = 1139 |
| 4984 | AT5G19430.1 Symbols: C3HC4.: Chr5: 6553998-6555616 FORWARD LENGTH = 255 |
| 4985 | AT5G19670.1 Symbols: no symbol available: no full name available. Chr5: 6647025-6649358 |
| | FORWARD LENGTH = 610 |
| 4986 | AT5G20250.4 Symbols: RS6, DIN10: raffinose synthase 6, DARK INDUCIBLE 10. Chr5: 6833730- |
| | 6836635 FORWARD LENGTH = 844 |
| 4987 | AT5G20450.1 Symbols: no symbol available: no full name available. Chr5: 6910968-6913132 |
| | REVERSE LENGTH = 341 |
| 4988 | AT5G20680.1 Symbols: TBL16: TRICHOME BIREFRINGENCE-LIKE 16. Chr5: 6998946-7001596 |
| | FORWARD LENGTH = 551 |
| 4989 | AT5G20930.1 Symbols: TSL: TOUSLED. Chr5: 7098213-7102970 FORWARD LENGTH = 688 |
| 4990 | AT5G21910.1 Symbols: no symbol available: no full name available. Chr5: 7240789-7241127 |
| | FORWARD LENGTH = 112 |
| 4991 | AT5G22130.2 Symbols: PNT1: PEANUT 1. Chr5: 7337486-7339831 REVERSE LENGTH = 470 |
| 4992 | AT5G22940.1 Symbols: F8H: FRA8 homolog. Chr5: 7677197-7678892 FORWARD LENGTH = 469 |
| 4993 | AT5G23450.3 Symbols: ATLCBK1, LCBK1: long-chain base (LCB) kinase 1. Chr5: 7905041-7908960 |
| | REVERSE LENGTH = 778 |
| 4994 | AT5G23610.2 Symbols: no symbol available: no full name available. Chr5: 7957641-7959968 |
| | REVERSE LENGTH = 500 |
| 4995 | AT5G24105.1 Symbols: AGP41: arabinogalactan protein 41. Chr5: 8152097-8152656 FORWARD |
| | LENGTH = 63 |
| 4996 | AT5G24360.2 Symbols: AtIRE1b, ATIRE1-1, IRE1-1, IRE1B: ARABIDOPSIS THALIANA INOSITOL |
| | REQUIRING 1-1, inositol requiring 1-1. Chr5: 8316718-8319827 FORWARD LENGTH = 887 |
| 4997 | AT5G24760.1 Symbols: no symbol available: no full name available. Chr5: 8495035-8497245 |
| | REVERSE LENGTH = 381 |
| 4998 | AT5G24970.2 Symbols: no symbol available: no full name available. Chr5: 8604358-8608656 |
| | REVERSE LENGTH = 761 |
| 4999 | AT5G25110.1 Symbols: CIPK25, SnRK3.25: CBL-interacting protein kinase 25, SNF1-RELATED |
| | PROTEIN KINASE 3.25. Chr5: 8657740-8659206 REVERSE LENGTH = 488 |
| 5000 | AT5G25560.2 Symbols: no symbol available: no full name available. Chr5: 8899486-8901391 |
| | FORWARD LENGTH = 308 |
| 5001 | AT5G25620.2 Symbols: AtYUC6, YUC6: YUCCA6. Chr5: 8935312-8938224 REVERSE LENGTH = 434 |
| 5002 | AT5G25760.1 Symbols: PEX4, UBC21: peroxin4, ubiquitin-conjugating enzyme 21. Chr5: 8967983- |
| | 8969173 FORWARD LENGTH = 157 |
| 5003 | AT5G26622.1 Symbols: no symbol available: no full name available. Chr5: 9356004-9356891 |
| | REVERSE LENGTH = 295 |
| 5004 | AT5G26740.1 Symbols: no symbol available: no full name available. Chr5: 9292436-9294407 |
| | FORWARD LENGTH = 422 |
| 5005 | AT5G26910.1 Symbols: TRM8: TON1 Recruiting Motif 8. Chr5: 9466169-9469523 REVERSE |
| | LENGTH = 853 |
| 5006 | AT5G26940.1 Symbols: DPD1: defective in pollen organelle DNA degradationl. Chr5: 9481429- |
| | 9482647 FORWARD LENGTH = 316 |
| 5007 | AT5G27950.1 Symbols: no symbol available: no full name available. Chr5: 9984774-9987493 |
| | FORWARD LENGTH = 625 |
| 5008 | AT5G28850.2 Symbols: no symbol available: no full name available. Chr5: 10877360-10881278 |
| | REVERSE LENGTH = 536 |
| 5009 | AT5G33210.1 Symbols: SRS8: SHI-related sequence 8. Chr5: 12465057-12465713 REVERSE |
| | LENGTH = 173 |
| 5010 | AT5G35980.1 Symbols: YAK1: yeast YAK1-related gene 1. Chr5: 14128551-14135984 FORWARD |
| | LENGTH = 956 |
| 5011 | AT5G35995.1 Symbols: no symbol available: no full name available. Chr5: 14136707-14138230 |
| | REVERSE LENGTH = 455 |
| 5012 | AT5G37370.1 Symbols: ATSRL1.: Chr5: 14812845-14815988 REVERSE LENGTH = 393 |
| 5013 | AT5G37380.1 Symbols: no symbol available: no full name available. Chr5: 14817035-14818330 |
| | REVERSE LENGTH = 431 |
| 5014 | AT5G38590.2 Symbols: no symbol available: no full name available. Chr5: 15452066-15453455 |
| | REVERSE LENGTH = 410 |
| 5015 | AT5G38970.1 Symbols: CYP85A1, ATBR6OX, BR6OX, BR6OX1: brassinosteroid-6-oxidase |
| | 1, BRASSINOSTEROID-6-OXIDASE. Chr5: 15594935-15597774 REVERSE LENGTH = 465 |
| 5016 | AT5G39360.1 Symbols: EDL2: EID1-like 2. Chr5: 15753313-15754062 REVERSE LENGTH = 249 |
| 5017 | AT5G39450.1 Symbols: no symbol available: no full name available. Chr5: 15786045-15787877 |
| | FORWARD LENGTH = 579 |
| 5018 | AT5G40370.2 Symbols: AtGRXC2, GRXC2: glutaredoxin C2. Chr5: 16147826-16148900 REVERSE |
| | LENGTH = 136 |
| 5019 | AT5G40760.1 Symbols: G6PD6: glucose-6-phosphate dehydrogenase 6. Chr5: 16311284-16314556 |
| | FORWARD LENGTH = 515 |
| 5020 | AT5G40810.1 Symbols: no symbol available: no full name available. Chr5: 16340200-16342327 |
| | FORWARD LENGTH = 307 |
| 5021 | AT5G41110.1 Symbols: no symbol available: no full name available. Chr5: 16452598-16454989 |
| | FORWARD LENGTH = 621 |
| 5022 | AT5G41410.1 Symbols: BEL1: BELL 1. Chr5: 16580424-16583770 FORWARD LENGTH = 611 |
| 5023 | AT5G41610.1 Symbols: CHX18, ATCHX18: ARABIDOPSIS THALIANA CATION/H+ EXCHANGER |
| | 18, cation/H+ exchanger 18. Chr5: 16638554-16641146 REVERSE LENGTH = 810 |
| 5024 | AT5G42560.1 Symbols: no symbol available: no full name available. Chr5: 17015573-17016969 |
| | FORWARD LENGTH = 296 |
| 5025 | AT5G43320.1 Symbols: ckl8, CK1.8: casein kinase 1-like 8. Chr5: 17386043-17388941 REVERSE |
| | LENGTH = 480 |
| 5026 | AT5G43810.1 Symbols: PNH, AGO10, ZLL: PINHEAD, ZWILLE, ARGONAUTE 10. Chr5: 17611939- |
| | 17616562 FORWARD LENGTH = 988 |
| 5027 | AT5G44040.1 Symbols: no symbol available: no full name available. Chr5: 17719896-17721348 |
| | REVERSE LENGTH = 416 |
| 5028 | AT5G44568.1 Symbols: no symbol available: no full name available. Chr5: 17961379-17962146 |
| | REVERSE LENGTH = 75 |
| 5029 | AT5G44800.1 Symbols: CHR4, PKR1: chromatin remodeling 4, PICKLE RELATED 1. Chr5: 18083659- |
| | 18092162 REVERSE LENGTH = 2223 |
| 5030 | AT5G44980.1 Symbols: no symbol available: no full name available. Chr5: 18160600-18162058 |
| | FORWARD LENGTH = 435 |
| 5031 | AT5G45100.1 Symbols: BRG1: BOI-related gene 1. Chr5: 18218769-18219741 FORWARD |
| | LENGTH = 294 |
| 5032 | AT5G45430.1 Symbols: no symbol available: no full name available. Chr5: 18409200-18411711 |
| | FORWARD LENGTH = 499 |
| 5033 | AT5G45470.1 Symbols: no symbol available: no full name available. Chr5: 18422164-18424764 |
| | REVERSE LENGTH = 866 |
| 5034 | AT5G45710.1 Symbols: AT-HSFA4C, RHA1, HSFA4C: HEAT SHOCK TRANSCRIPTION FACTOR |
| | A4C, ROOT HANDEDNESS 1. Chr5: 18541576-18542706 FORWARD LENGTH = 345 |
| 5035 | AT5G45820.1 Symbols: PKS18, SnRK3.6, CIPK20: PROTEIN KINASE 18, SNF1-RELATED PROTEIN |
| | KINASE 3.6, CBL-interacting protein kinase 20. Chr5: 18587081-18588400 REVERSE LENGTH = 439 |
| 5036 | AT5G47050.1 Symbols: no symbol available: no full name available. Chr5: 19106612-19107860 |
| | FORWARD LENGTH = 300 |
| 5037 | AT5G47070.1 Symbols: no symbol available: no full name available. Chr5: 19118683-19120528 |
| | REVERSE LENGTH = 410 |
| 5038 | AT5G47100.1 Symbols: CBL9, ATCBL9: calcineurin B-like protein 9. Chr5: 19129896-19131727 |
| | REVERSE LENGTH = 213 |
| 5039 | AT5G47220.1 Symbols: ATERF-2, ATERF2, ERF2: ETHYLENE RESPONSIVE ELEMENT BINDING |
| | FACTOR 2, ethylene responsive element binding factor 2, ETHYLENE RESPONSE FACTOR- 2. |
| | Chr5: 19172023-19172754 REVERSE LENGTH = 243 |
| 5040 | AT5G47250.1 Symbols: no symbol available: no full name available. Chr5: 19186045-19188576 |
| | REVERSE LENGTH = 843 |
| 5041 | AT5G47430.1 Symbols: no symbol available: no full name available. Chr5: 19235819-19240596 |
| | REVERSE LENGTH = 892 |
| 5042 | AT5G47520.1 Symbols: RABA5a, AtRABA5a: RAB GTPase homolog A5A. Chr5: 19277596-19278366 |
| | REVERSE LENGTH = 221 |
| 5043 | AT5G47710.1 Symbols: no symbol available: no full name available. Chr5: 19330470-19331178 |
| | FORWARD LENGTH = 166 |
| 5044 | AT5G47720.2 Symbols: AACT1: acetoacetyl-CoA thiolase 1. Chr5: 19331762-19334145 FORWARD |
| | LENGTH = 415 |
| 5045 | AT5G47730.1 Symbols: no symbol available: no full name available. Chr5: 19334592-19336618 |
| | REVERSE LENGTH = 341 |
| 5046 | AT5G47970.1 Symbols: no symbol available: no full name available. Chr5: 19423420-19425585 |
| | FORWARD LENGTH = 387 |
| 5047 | AT5G48220.1 Symbols: no symbol available: no full name available. Chr5: 19549930-19552046 |
| | FORWARD LENGTH = 379 |
| 5048 | AT5G48230.2 Symbols: EMB1276, ACAT2, AACT2: acetoacetyl-CoA thiolasc 2, EMBRYO |
| | DEFECTIVE 1276, Acetoacetyl-CoA thiolase 2. Chr5: 19552570-19555122 REVERSE LENGTH = 403 |
| 5049 | AT5G48580.1 Symbols: FKBP15-2: FK506- and rapamycin-binding protein 15 kD-2. Chr5: 19696156- |
| | 19697304 REVERSE LENGTH = 163 |
| 5050 | AT5G48610.1 Symbols: no symbol available: no full name available. Chr5: 19712614-19714861 |
| | FORWARD LENGTH = 354 |
| 5051 | AT5G48655.2 Symbols: no symbol available: no full name available. Chr5: 19731575-19732486 |
| | REVERSE LENGTH = 203 |
| 5052 | AT5G48660.1 Symbols: no symbol available: no full name available. Chr5: 19736986-19738327 |
| | FORWARD LENGTH = 219 |
| 5053 | AT5G49470.2 Symbols: RAF10.: Chr5: 20063616-20068311 FORWARD LENGTH = 831 |
| 5054 | AT5G49610.1 Symbols: no symbol available: no full name available. Chr5: 20131448-20132527 |
| | REVERSE LENGTH = 359 |
| 5055 | AT5G50010.1 Symbols: no symbol available: no full name available. Chr5: 20349556-20350491 |
| | FORWARD LENGTH = 311 |
| 5056 | AT5G50180.1 Symbols: no symbol available: no full name available. Chr5: 20431116-20432883 |
| | FORWARD LENGTH = 346 |
| 5057 | AT5G50400.1 Symbols: PAP27, ATPAP27: ARABIDOPSIS THALIANA PURPLE ACID |
| | PHOSPHATASE 27, purple acid phosphatase 27. Chr5: 20523575-20526231 REVERSE LENGTH = 611 |
| 5058 | AT5G50430.1 Symbols: UBC33: ubiquitin-conjugating enzyme 33. Chr5: 20534366-20536307 |
| | REVERSE LENGTH = 243 |
| 5059 | AT5G50565.1 Symbols: no symbol available: no full name available. Chr5: 20580894-20581826 |
| | FORWARD LENGTH = 75 |
| 5060 | AT5G51060.1 Symbols: RHD2, RBOHC, ATRBOHC: ROOT HAIR DEFECTIVE 2, RESPIRATORY |
| | BURST OXIDASE HOMOLOG C, A. THALIANA RESPIRATORY BURST OXIDASE HOMOLOG C. |
| | Chr5: 20757484-20762175 REVERSE LENGTH = 905 |
| 5061 | AT5G52030.2 Symbols: no symbol available: no full name available. Chr5: 21128291-21130034 |
| | FORWARD LENGTH = 402 |
| 5062 | AT5G52040.2 Symbols: ATRSP41, RS41, At-RS41: arginine/serine-rich splicing factor 41. |
| | Chr5: 21131081-21133318 FORWARD LENGTH = 357 |
| 5063 | AT5G52530.1 Symbols: no symbol available: no full name available. Chr5: 21318215-21320882 |
| | FORWARD LENGTH = 828 |
| 5064 | AT5G52550.1 Symbols: no symbol available: no full name available. Chr5: 21327914-21328996 |
| | REVERSE LENGTH = 360 |
| 5065 | AT5G52860.1 Symbols: ABCG8: ATP-binding cassette G8. Chr5: 21419776-21421545 REVERSE |
| | LENGTH = 589 |
| 5066 | AT5G52890.2 Symbols: no symbol available: no full name available. Chr5: 21445040-21446197 |
| | REVERSE LENGTH = 385 |
| 5067 | AT5G53180.1 Symbols: PTB2, ATPTB2: polypyrimidine tract-binding protein 2, POLYPYRIMIDINE |
| | TRACT-BINDING PROTEIN 2. Chr5: 21568393-21571537 REVERSE LENGTH = 429 |
| 5068 | AT5G53250.1 Symbols: AGP22, ATAGP22: ARABINOGALACTAN PROTEIN 22, arabinogalactan |
| | protein 22. Chr5: 21603715-21604007 FORWARD LENGTH = 63 |
| 5069 | AT5G53550.1 Symbols: YSL3, ATYSL3: YELLOW STRIPE like 3, YELLOW STRIPE LIKE 3. |
| | Chr5: 21756081-21758776 FORWARD LENGTH = 675 |
| 5070 | AT5G53590.1 Symbols: SAUR30: SMALL AUXIN UPREGULATED RNA 30. Chr5: 21772107- |
| | 21772535 FORWARD LENGTH = 142 |
| 5071 | AT5G53620.1 Symbols: no symbol available: no full name available. Chr5: 21781217-21785061 |
| | FORWARD LENGTH = 682 |
| 5072 | AT5G53760.1 Symbols: MLO11, ATMLO11: MILDEW RESISTANCE LOCUS O 11. Chr5: 21823055- |
| | 21826289 FORWARD LENGTH = 573 |
| 5073 | AT5G53880.1 Symbols: no symbol available: no full name available. Chr5: 21872995-21873195 |
| | REVERSE LENGTH = 66 |
| 5074 | AT5G54130.2 Symbols: no symbol available: no full name available. Chr5: 21962900-21965279 |
| | FORWARD LENGTH = 436 |
| 5075 | AT5G54650.1 Symbols: Fh5, ATFH5: FORMIN HOMOLOGY 5, formin homology5. Chr5: 22197856- |
| | 22201649 REVERSE LENGTH = 900 |
| 5076 | AT5G54670.1 Symbols: KATC, ATK3: kinesin 3, KINESIN-LIKE PROTEIN IN ARABIDOPSIS |
| | THALIANA C. Chr5: 22209912-22213843 FORWARD LENGTH = 754 |
| 5077 | AT5G54730.1 Symbols: ATATG18F, G18F, ATG18F: ARABIDOPSIS THALIANA HOMOLOG OF |
| | YEAST AUTOPHAGY 18 (ATG18) F, homolog of yeast autophagy 18 (ATG18) F. Chr5: 22233977- |
| | 22236804 REVERSE LENGTH = 763 |
| 5078 | AT5G54760.1 Symbols: no symbol available: no full name available. Chr5: 22244732-22245517 |
| | FORWARD LENGTH = 113 |
| 5079 | AT5G55120.1 Symbols: VTC5: VITAMIN C DEFECTIVE 5. Chr5: 22369515-22371709 FORWARD |
| | LENGTH = 431 |
| 5080 | AT5G55600.1 Symbols: no symbol available: no full name available. Chr5: 22522232-22524796 |
| | REVERSE LENGTH = 663 |
| 5081 | AT5G55850.2 Symbols: NOI.: Chr5: 22603617-22604951 FORWARD LENGTH = 130 |
| 5082 | AT5G55910.1 Symbols: D6PK: D6 protein kinase. Chr5: 22640055-22641634 REVERSE LENGTH = 498 |
| 5083 | AT5G55970.1 Symbols: no symbol available: no full name available. Chr5: 22668019-22669312 |
| | FORWARD LENGTH = 343 |
| 5084 | AT5G56250.2 Symbols: HAP8: HAPLESS 8. Chr5: 22768918-22771869 REVERSE LENGTH = 811 |
| 5085 | AT5G56790.1 Symbols: no symbol available: no full name available. Chr5: 22968610-22971391 |
| | FORWARD LENGTH = 669 |
| 5086 | AT5G56900.2 Symbols: no symbol available: no full name available. Chr5: 23019750-23022670 |
| | REVERSE LENGTH = 596 |
| 5087 | AT5G57015.1 Symbols: ckl12: casein kinase I-like 12. Chr5: 23071508-23074577 FORWARD |
| | LENGTH = 435 |
| 5088 | AT5G57050.1 Symbols: ABI2, AtABI2: ABA INSENSITIVE 2. Chr5: 23087720-23089303 FORWARD |
| | LENGTH = 423 |
| 5089 | AT5G57180.2 Symbols: CIA2: chloroplast import apparatus 2. Chr5: 23168393-23170763 FORWARD |
| | LENGTH = 435 |
| 5090 | AT5G57290.1 Symbols: P3B, AtP3B: ribosomal P3 protein B. Chr5: 23207049-23207835 REVERSE |
| | LENGTH = 120 |
| 5091 | AT5G57340.2 Symbols: no symbol available: no full name available. Chr5: 23228022-23229094 |
| | FORWARD LENGTH = 256 |
| 5092 | AT5G57550.1 Symbols: XTH25, XTR3: xyloglucan endotransglucosylase/hydrolase 25, xyloglucan |
| | endotransglycosylase 3. Chr5: 23305055-23306384 REVERSE LENGTH = 284 |
| 5093 | AT5G57565.1 Symbols: no symbol available: no full name available. Chr5: 23310872-23311494 |
| | FORWARD LENGTH = 143 |
| 5094 | AT5G57610.1 Symbols: no symbol available: no full name available. Chr5: 23325307-23329099 |
| | FORWARD LENGTH = 1054 |
| 5095 | AT5G57790.1 Symbols: AOG1: ABORTED GAMETOPHYTE 1. Chr5: 23412596-23413442 REVERSE |
| | LENGTH = 216 |
| 5096 | AT5G58200.2 Symbols: no symbol available: no full name available. Chr5: 23549605-23551972 |
| | FORWARD LENGTH = 309 |
| 5097 | AT5G58370.2 Symbols: EngB-3.: Chr5: 23593358-23595645 FORWARD LENGTH = 465 |
| 5098 | AT5G58540.1 Symbols: no symbol available: no full name available. Chr5: 23663400-23665182 |
| | FORWARD LENGTH = 484 |
| 5099 | AT5G58930.1 Symbols: no symbol available: no full name available. Chr5: 23794529-23796094 |
| | REVERSE LENGTH = 521 |
| 5100 | AT5G58960.1 Symbols: GIL1: GRAVITROPIC IN THE LIGHT. Chr5: 23805799-23808360 |
| | FORWARD LENGTH = 559 |
| 5101 | AT5G59010.1 Symbols: BSK5: brassinosteroid-signaling kinase 5. Chr5: 23820578-23823099 |
| | REVERSE LENGTH = 489 |
| 5102 | AT5G59370.1 Symbols: ACT4: actin 4. Chr5: 23950109-23951586 FORWARD LENGTH = 377 |
| 5103 | AT5G59430.1 Symbols: TRP1, ATTRP1: TELOMERE REPEAT BINDING PROTEIN 1, telomeric |
| | repeat binding protein 1. Chr5: 23968254-23970695 FORWARD LENGTH = 578 |
| 5104 | AT5G59780.3 Symbols: ATMYB59-1, MYB59, ATMYB59, ATMYB59-3, ATMYB59-2: MYB DOMAIN |
| | PROTEIN 59, myb domain protein 59. Chr5: 24082425-24083350 REVERSE LENGTH = 235 |
| 5105 | AT5G59950.5 Symbols: no symbol available: no full name available. Chr5: 24140235-24141504 |
| | FORWARD LENGTH = 245 |
| 5106 | AT5G60050.1 Symbols: no symbol available: no full name available. Chr5: 24183680-24185264 |
| | REVERSE LENGTH = 499 |
| 5107 | AT5G60100.2 Symbols: PRR3, APRR3: pseudo-response regulator 3. Chr5: 24198215-24200502 |
| | REVERSE LENGTH = 522 |
| 5108 | AT5G60450.1 Symbols: ARF4: auxin response factor 4. Chr5: 24308558-24312187 REVERSE |
| | LENGTH = 788 |
| 5109 | AT5G60550.1 Symbols: ATSNAK1, GRIK2: geminivirus rep interacting kinase 2. Chr5: 24340135- |
| | 24342356 FORWARD LENGTH = 407 |
| 5110 | AT5G60570.1 Symbols: no symbol available: no full name available. Chr5: 24348713-24349894 |
| | FORWARD LENGTH = 393 |
| 5111 | AT5G60580.2 Symbols: no symbol available: no full name available. Chr5: 24354298-24356706 |
| | FORWARD LENGTH = 494 |
| 5112 | AT5G60690.1 Symbols: IFL, REV, IFL1: INTERFASCICULAR FIBERLESS, INTERFASCICULAR |
| | FIBERLESS 1, REVOLUTA. Chr5: 24397734-24401933 FORWARD LENGTH = 842 |
| 5113 | AT5G60750.1 Symbols: SCO4: snowy cotyledon 4. Chr5: 24431072-24433199 FORWARD |
| | LENGTH = 347 |
| 5114 | AT5G60890.1 Symbols: ATR1, AtATR1, ATMYB34, MYB34: ALTERED TRYPTOPHAN |
| | REGULATION 1, myb domain protein 34. Chr5: 24495029-24496220 FORWARD LENGTH = 295 |
| 5115 | AT5G60940.1 Symbols: no symbol available: no full name available. Chr5: 24523092-24525655 |
| | FORWARD LENGTH = 429 |
| 5116 | AT5G61010.1 Symbols: EXO70E2, ATEXO70E2: exocyst subunit exo70 family protein E2. |
| | Chr5: 24554612-24556531 FORWARD LENGTH = 639 |
| 5117 | AT5G61230.1 Symbols: PIA2, ANK6: ankyrin repeat protein 6, phytochrome interacting ankyrin-repeat |
| | protcin 2. Chr5: 24628254-24628778 FORWARD LENGTH = 174 |
| 5118 | AT5G61380.1 Symbols: PRR1, AtTOC1, TOC1, APRR1: TIMING OF CAB EXPRESSION 1, PSEUDO- |
| | RESPONSE REGULATOR 1. Chr5: 24675540-24678176 FORWARD LENGTH = 618 |
| 5119 | AT5G61420.2 Symbols: HAG1, MYB28, AtMYB28, PMG1: HIGH ALIPHATIC GLUCOSINOLATE |
| | 1, PRODUCTION OF METHIONINE-DERIVED GLUCOSINOLATE 1, myb domain protein 28. |
| | Chr5: 24689475-24690795 REVERSE LENGTH = 366 |
| 5120 | AT5G61540.1 Symbols: no symbol available: no full name available. Chr5: 24744994-24747142 |
| | FORWARD LENGTH = 359 |
| 5121 | AT5G61570.1 Symbols: no symbol available: no full name available. Chr5: 24758507-24760201 |
| | FORWARD LENGTH = 361 |
| 5122 | AT5G61960.1 Symbols: ML1, AML1: MEI2-like protein 1. Chr5: 24879001-24883483 REVERSE |
| | LENGTH = 915 |
| 5123 | AT5G62090.1 Symbols: SLK2: SEUSS-like 2. Chr5: 24935221-24938540 REVERSE LENGTH = 816 |
| 5124 | AT5G62130.2 Symbols: no symbol available: no full name available. Chr5: 24950685-24952426 |
| | REVERSE LENGTH = 345 |
| 5125 | AT5G62620.1 Symbols: GALT6.: Chr5: 25137136-25139764 FORWARD LENGTH = 681 |
| 5126 | AT5G62640.3 Symbols: ELF5, AtELF5: EARLY FLOWERING 5. Chr5: 25149584-25152351 |
| | REVERSE LENGTH = 540 |
| 5127 | AT5G62760.1 Symbols: no symbol available: no full name available. Chr5: 25204730-25209393 |
| | REVERSE LENGTH = 661 |
| 5128 | AT5G64130.3 Symbols: no symbol available: no full name available. Chr5: 25664547-25665339 |
| | REVERSE LENGTH = 140 |
| 5129 | AT5G64150.1 Symbols: no symbol available: no full name available. Chr5: 25668997-25670731 |
| | REVERSE LENGTH = 377 |
| 5130 | AT5G64250.2 Symbols: no symbol available: no full name available. Chr5: 25697623-25698945 |
| | REVERSE LENGTH = 333 |
| 5131 | AT5G64340.1 Symbols: SAC51: SUPPRESSOR OF ACAULIS 51. Chr5: 25730890-25731936 |
| | REVERSE LENGTH = 348 |
| 5132 | AT5G64460.2 Symbols: no symbol available: no full name available. Chr5: 25773009-25775104 |
| | REVERSE LENGTH = 282 |
| 5133 | AT5G64550.1 Symbols: no symbol available: no full name available. Chr5: 25801794-25803698 |
| | REVERSE LENGTH = 634 |
| 5134 | AT5G64960.1 Symbols: CDKC2, CDKC 2: cyclin dependent kinase group C2, Cyclin-dependent kinase |
| | C 2. Chr5: 25955497-25958427 FORWARD LENGTH = 513 |
| 5135 | AT5G65180.1 Symbols: no symbol available: no full name available. Chr5: 26045625-26047806 |
| | FORWARD LENGTH = 439 |
| 5136 | AT5G65310.1 Symbols: HB5, ATHB-5, ATHB5: homeobox protein 5. Chr5: 26102457-26104217 |
| | REVERSE LENGTH = 312 |
| 5137 | AT5G65740.2 Symbols: no symbol available: no full name available. Chr5: 26301702-26303422 |
| | REVERSE LENGTH = 300 |
| 5138 | AT5G66005.3 Symbols: no symbol available: no full name available. Chr5: 26397864-26399123 |
| | REVERSE LENGTH = 192 |
| 5139 | AT5G66040.1 Symbols: STR16: sulfurtransferase protein 16. Chr5: 26410557-26411139 FORWARD |
| | LENGTH = 120 |
| 5140 | AT5G66050.1 Symbols: no symbol available: no full name available. Chr5: 26412333-26414428 |
| | REVERSE LENGTH = 340 |
| 5141 | AT5G66110.1 Symbols: HIPP27: heavy metal associated isoprenylated plant protein 27. Chr5: 26430245- |
| | 26430778 FORWARD LENGTH = 147 |
| 5142 | AT5G66250.4 Symbols: no symbol available: no full name available. Chr5: 26469050-26470376 |
| | FORWARD LENGTH = 326 |
| 5143 | AT5G66310.1 Symbols: no symbol available: no full name available. Chr5: 26485786-26490304 |
| | REVERSE LENGTH = 1063 |
| 5144 | AT5G66420.2 Symbols: no symbol available: no full name available. Chr5: 26521893-26524986 |
| | REVERSE LENGTH = 754 |
| 5145 | AT5G66600.4 Symbols: no symbol available: no full name available. Chr5: 26575105-26578315 |
| | REVERSE LENGTH = 614 |
| 5146 | AT5G66730.1 Symbols: ENY, IDD1: INDETERMINATE DOMAIN 1, ENHYDROUS. Chr5: 26641914- |
| | 26643883 REVERSE LENGTH = 500 |
| 5147 | AT5G67440.1 Symbols: MEL2, NPY3: NAKED PINS IN YUC MUTANTS 3, MAB4/ENP/NPY1-LIKE |
| | 2. Chr5: 26912947-26914906 REVERSE LENGTH = 579 |
| 5148 | AT5G67600.1 Symbols: WIH1: WINDHOSE 1. Chr5: 26959754-26960226 REVERSE LENGTH = 82 |
| 5149 | AT5G67620.1 Symbols: no symbol available: no full name available. Chr5: 26964891-26965720 |
| | REVERSE LENGTH = 182 |
| 5150 | ATMG00410.1 Symbols: ATP6, ATP6-1: ATPASE SUBUNIT 6, ATPase subunit 6-1. ChrM: 111750- |
| | 112907 FORWARD LENGTH = 385 |
| 5151 | ATMG00730.1 Symbols: COX3: cytochrome c oxidase subunit 3. ChrM: 218280-219077 FORWARD |
| | LENGTH = 265 |
| 5152 | AT4G36900.1 RAP2.10 (related to AP2 10). DNA binding. transcription factor |
| 5153 | AT2G23340.1 |
| 5154 | AT5G67190.1 Ethylene-responsive transcription factor ERF010. DEAR2, DREB and EAR MOTIF |
| | PROTEIN 2. Binds to the GCC-box pathogenesis-related promoter clement |
| 5155 | AT3G50260.1 |
| 5156 | ORF 1 frame 1 Candidate gene identified from homology search to AT1G01060 |
| 5157 | ORF 2 frame 1 Candidate gene identified from homology search to AT1G01060 |
| 5158 | ORF 3 frame 1 Candidate gene identified from homology search to AT1G01060 |
| 5159 | ORF 4 frame 1 Candidate gene identified from homology search to AT1G01060 |
| 5160 | ORF 5 frame 1 Candidate gene identified from homology search to AT1G01060 |
| 5161 | ORF 6 frame 1 Candidate gene identified from homology search to AT1G01060 |
| 5162 | ORF 7 frame 2 Candidate gene identified from homology search to AT1G01060 |
| 5163 | ORF 8 frame 2 Candidate gene identified from homology search to AT1G01060 |
| 5164 | ORF 9 frame 2 Candidate gene identified from homology search to AT1G01060 |
| 5165 | ORF 10 frame 2 Candidate gene identified from homology search to AT1G01060 |
| 5166 | ORF 11 frame 2 Candidate gene identified from homology search to AT1G01060 |
| 5167 | ORF 12 frame 2 Candidate gene identified from homology search to AT1G01060 |
| 5168 | ORF 13 frame 2 Candidate gene identified from homology search to AT1G01060 |
| 5169 | ORF 14 frame 2 Candidate gene identified from homology search to AT1G01060 |
| 5170 | ORF 15 frame 2 Candidate gene identified from homology search to AT1G01060 |
| 5171 | ORF 16 frame 3 Candidate gene identified from homology search to AT1G01060 |
| 5172 | ORF 17 frame 3 Candidate gene identified from homology search to AT1G01060 |
| 5173 | ORF 18 frame 3 Candidate gene identified from homology search to AT1G01060 |
| 5174 | ORF 19 frame 3 Candidate gene identified from homology search to AT1G01060 |
| 5175 | ORF 20 frame 3 Candidate gene identified from homology search to AT1G01060 |
| 5176 | ORF 1 frame 1 Candidate gene identified from homology search to AT1G01060 |
| 5177 | ORF 2 frame 1 Candidate gene identified from homology search to AT1G01060 |
| 5178 | ORF 3 frame 1 Candidate gene identified from homology search to AT1G01060 |
| 5179 | ORF 4 frame 1 Candidate gene identified from homology search to AT1G01060 |
| 5180 | ORF 5 frame 1 Candidate gene identified from homology search to AT1G01060 |
| 5181 | ORF 6 frame 2 Candidate gene identified from homology search to AT1G01060 |
| 5182 | ORF 7 frame 2 Candidate gene identified from homology search to AT1G01060 |
| 5183 | ORF 8 frame 2 Candidate gene identified from homology search to AT1G01060 |
| 5184 | ORF 9 frame 2 Candidate gene identified from homology search to AT1G01060 |
| 5185 | ORF 10 frame 3 Candidate gene identified from homology search to AT1G01060 |
| 5186 | ORF 11 frame 3 Candidate gene identified from homology search to AT1G01060 |
| 5187 | ORF 12 frame 3 Candidate gene identified from homology search to AT1G01060 |
| 5188 | ORF 13 frame 3 Candidate gene identified from homology search to AT1G01060 |
| 5189 | ORF 1 frame 1 Candidate gene identified from homology search to AT1G01060 |
| 5190 | ORF 2 frame 1 Candidate gene identified from homology search to AT1G01060 |
| 5191 | ORF 3 frame 1 Candidate gene identified from homology search to AT1G01060 |
| 5192 | ORF 4 frame 1 Candidate gene identified from homology search to AT1G01060 |
| 5193 | ORF 5 frame 1 Candidate gene identified from homology search to AT1G01060 |
| 5194 | ORF 6 frame 1 Candidate gene identified from homology search to AT1G01060 |
| 5195 | ORF 7 frame 1 Candidate gene identified from homology search to AT1G01060 |
| 5196 | ORF 8 frame 1 Candidate gene identified from homology search to AT1G01060 |
| 5197 | ORF 9 frame 2 Candidate gene identified from homology search to AT1G01060 |
| 5198 | ORF 10 frame 2 Candidate gene identified from homology search to AT1G01060 |
| 5199 | ORF 11 frame 2 Candidate gene identified from homology search to AT1G01060 |
| 5200 | ORF 12 frame 2 Candidate gene identified from homology search to AT1G01060 |
| 5201 | ORF 13 frame 2 Candidate gene identified from homology search to AT1G01060 |
| 5202 | ORF 14 frame 2 Candidate gene identified from homology search to AT1G01060 |
| 5203 | ORF 15 frame 3 Candidate gene identified from homology search to AT1G01060 |
| 5204 | ORF 16 frame 3 Candidate gene identified from homology search to AT1G01060 |
| 5205 | ORF 17 frame 3 Candidate gene identified from homology search to AT1G01060 |
| 5206 | ORF 18 frame 3 Candidate gene identified from homology search to AT1G01060 |
| 5207 | ORF 19 frame 3 Candidate gene identified from homology search to AT1G01060 |
| 5208 | ORF 20 frame 3 Candidate gene identified from homology search to AT1G01060 |
| 5209 | ORF 21 frame 3 Candidate gene identified from homology search to AT1G01060 |
| 5210 | ORF 22 frame 3 Candidate gene identified from homology search to AT1G01060 |
| 5211 | ORF 1 frame 1 Candidate gene identified from homology search to At4g36900.1 |
| 5212 | ORF 2 frame 1 Candidate gene identified from homology search to At4g36900.1 |
| 5213 | ORF 3 frame 1 Candidate gene identified from homology search to At4g36900.1 |
| 5214 | ORF 4 frame 1 Candidate gene identified from homology search to At4g36900.1 |
| 5215 | ORF 5 frame 1 Candidate gene identified from homology search to At4g36900.1 |
| 5216 | ORF 6 framc 1 Candidate gene identified from homology search to At4g36900.1 |
| 5217 | ORF 7 frame 2 Candidate gene identified from homology search to At4g36900.1 |
| 5218 | ORF 8 frame 2 Candidate gene identified from homology search to At4g36900.1 |
| 5219 | ORF 9 frame 2 Candidate gene identified from homology search to At4g36900.1 |
| 5220 | ORF 10 frame 2 Candidate gene identified from homology search to At4g36900.1 |
| 5221 | ORF 11 frame 2 Candidate gene identified from homology search to At4g36900.1 |
| 5222 | ORF 12 frame 2 Candidate gene identified from homology search to At4g36900.1 |
| 5223 | ORF 13 frame 3 Candidate gene identified from homology search to At4g36900.1 |
| 5224 | ORF 14 frame 3 Candidate gene identified from homology search to At4g36900.1 |
| 5225 | ORF 15 frame 3 Candidate gene identified from homology search to At4g36900.1 |
| 5226 | ORF 16 frame 3 Candidate gene identified from homology search to At4g36900.1 |
| 5227 | ORF 17 frame 3 Candidate gene identified from homology search to At4g36900.1 |

Gene Ontology Analysis of the Candidate uORF Genes

[0074] The gene list was analyzed with the DAVID bioinformatics resource version 6.8 (david.ncifcrf.gov/). Table 2 summarizes the output of this analysis. Of the functional categories analyzed the keywords captured 99.4% of the unique genes. Of these, a large proportion include one or more of the terms alternative splicing, transcription factor, transcription, nucleus, DNA binding, coiled-coil and kinase. Of the Gene ontology analysis, biological process categories enriched for transcription (DNA template), regulation of transcription (DNA template) protein phosphorylation and kinase were also notable. It was also surprising to note that 18 genes involved in the response to ethylene were detected and 20 genes involved in floral development. Of the cellular function categorization, the largest proportion of genes 46.9% were assigned to the nucleus. On the molecular function categorization, transcription factors, protein kinase, DNA binding and ATP binding were all identified as enriched in the uORF list generated.

TABLE 2
Output of gene list analyzed with DAVID bioinformatics resource

| | Detected | Detected in | |
|---|---|---|---|
| | in all three | at least two | Detected only in |
| Unique | datasets | datasets | one dataset |
| 24 | 45 | 12 | 5 |

Numbering Convention, Transcription Factors and uPEPs

[0075] The uORFs and uPEPs identified in this project are included in the Sequence Listing as SEQ ID NO: 2n−1 (SEQ ID NO: 1, 3, 5, 7, 9, and every other odd numbered sequence to 3997) and SEQ ID No: 2n (SEQ ID NOs: 2, 4, 6, 8, 10, and every other even numbered sequence to 3998), respectively, where n=1-1999 (i.e., the identified uORFs are SEQ ID NO: 1, 3, 5, 7, 9, and every other odd numbered sequence to 3997; and the identified uORF translations are SEQ ID NO: 2, 4, 6, 8, 10, and every other even numbered sequence to 3998, respectively). These and a description for each of the transcription factor classes are included the Sequence Listing; the summary of each sequence includes AGI number, TAIR_ID, uORF ‘5 STOP, uORF 3′ STOP, leader length, and each is followed by the uORF or uPEP (the latter is a translation of the uORF).

[0076] A uORF and uORF translation (uPEP) analysis was conducted with a total of 130 transcription factors encoding loci from Arabidopsis identified in our analysis. Representatives from almost all transcription factor classes were identified by our analysis, but some families seem to be particularly enriched in uORFs; these include the AP2 gene family, the homeodomain leucine zipper family, the sNF-family and one STAT transcription factor. The gene ontology list of genes involved in flowering is included in the Sequence Listing which contains a number of transcription factors including AP2, ARF, Homeodomain, and MYB transcription factors. It is also worth noting that the flowering time control protein FCA, which is theorized to function as an RNA binding protein is included in the list of uORF regulated loci that we identified.

### Example Individual Gene Profiles

[0077] Below are more detailed descriptions for a selection of example loci where the ribosome coverage, stop-stop fragment and statistically significant ratios and deltas (based on ribosome profiling before and after the 3′ stop) are shown in FIGS. 1-3.

[0078] At2g23340.1 two clear clusters of ribosomes are found upstream of the long ORF (horizontal line at top of FIG. 1). There is a long ORF (top dotted line: - - - - - -) covering the leader region. The uORF designated by open circles was selected as significantly different by ratio (FIG. 1).

[0079] At4g36900.1: FIG. 2 shows a clear enrichment of ribosomes apparent in the leader (selected as significantly different by ratio and delta) (FIG. 2).

[0080] AT4g16280.2 is the functional gene model for FCA. There are four gene models but only 0.2 and 0.4 contain open reading frames and the alternative splicing could potentially interfere with the candidate uORF that is clearly identified as the enrichment of ribosomes upstream of the long ORF (FIG. 3).

[0081] HD-ZIP transcription factors. This class of transcription factors is especially enriched for uORFs. FIGS. 1, 2, and 3 highlight some of the gene candidates with ribosome profiling demonstrating ribosome enrichment upstream of the long open reading frame.

### Bioinformatic Analysis and the Identification of Homologs

[0082] An important aspect of the present invention is that if a locus containing an mORFs that encodes a polypeptide with a desired function is identified as having an upstream uORF in a reference species, the equivalent locus with an mORF encoding a homolog of the polypeptide in a target crop will also typically possess a uORF. That is, the presence of uORF is typically conserved across homologous loci An example of this phenomenon has been shown with ascorbate biosynthesis genes across species. For example, see Zhang et al., 2018, Nature Biotechnology volume 36, pages 894-898. Thus, a practitioner may apply the methods herein to identify a uORF in a locus in Arabidopsis, and then identify loci with main ORFs encoding homologs in the target crop and then deploy gene editing to the mutate the uORF sequence upstream of the mORF in the crop to remove the repression imposed by the uORF. Typically, this involves mutating sequences between 1-1100 bp upstream of the start codon of the mORF. A single edit may be sufficient for this purpose although two edits or multiple edits can be made to the uORF.

[0083] Homologs may be identified through various bioinformatic methods, as exemplified herein. The present invention may be an integrated system, computer or computer readable medium that comprises an instruction set for determining the identity of one or more sequences in a database. In addition, the instruction set can be used to generate or identify sequences that meet any specified criteria. Furthermore, the instruction set may be used to associate or link certain functional benefits, such improved characteristics, with one or more identified sequence.

[0084] For example, the instruction set can include, e.g., a sequence comparison or other alignment program, e.g., an available program such as, for example, the Wisconsin Package Version 10.0, such as BLAST, FASTA, PILEUP, FINDPATTERNS or the like (GCG, Madison, WI). Public sequence databases such as GenBank, EMBL, Swiss-Prot and PIR or private sequence databases can be searched.

[0085] Alignment of sequences for comparison can be conducted by the local homology algorithm of Smith and Waterman (1981) Adv. Appl. Math. 2: 482-489, by the homology alignment algorithm of Needleman and Wunsch (1970) J. Mol. Biol. 48: 443-453, by the search for similarity method of Pearson and Lipman (1988) Proc. Natl. Acad. Sci. 85: 2444-2448, by computerized implementations of these algorithms. After alignment, sequence comparisons between two (or more) polynucleotides or polypeptides are typically performed by comparing sequences of the two sequences over a comparison window to identify and compare local regions of sequence similarity. The comparison window can be a segment of at least about 10 contiguous positions, usually about 50 to about 200, more usually about 100 to about 150 contiguous positions. A description of the method is provided in Ausubel, et al. supra.

[0086] A variety of methods for determining sequence relationships can be used, including manual alignment and computer assisted sequence alignment and analysis. This latter approach is a preferred approach in the present invention, due to the increased throughput afforded by computer assisted methods. As noted above, a variety of computer programs for performing sequence alignment are available, or can be produced by one of skill.

[0087] One example algorithm that is suitable for determining percent sequence identity and sequence similarity is the BLAST algorithm, which is described in Altschul, et al. (1990) J. Mol. Biol. 215: 403-410. Software for performing BLAST analyses is publicly available, e.g., through the National Library of Medicine's National Center for Biotechnology Information (www.ncbi.nlm.nih.gov/). This algorithm involves first identifying high scoring sequence pairs (HSPs) by identifying short words of length W in the query sequence, which either match or satisfy some positive-valued threshold score T when aligned with a word of the same length in a database sequence. T is referred to as the neighborhood word score threshold (Altschul et al. supra). These initial neighborhood word hits act as seeds for initiating searches to find longer HSPs containing them. The word hits are then extended in both directions along each sequence for as far as the cumulative alignment score can be increased. Cumulative scores are calculated using, for nucleotide sequences, the parameters M (reward score for a pair of matching residues; always>0) and N (penalty score for mismatching residues; always<0). For amino acid sequences, a scoring matrix is used to calculate the cumulative score. Extension of the word hits in each direction are halted when: the cumulative alignment score falls off by the quantity X from its maximum achieved value; the cumulative score goes to zero or below, due to the accumulation of one or more negative-scoring residue alignments; or the end of either sequence is reached. The BLAST algorithm parameters W, T, and X determine the sensitivity and speed of the alignment. The BLASTN program (for nucleotide sequences) uses as defaults a wordlength (W) of 11, an expectation (E) of 10, a cutoff of 100, M=5, N=−4, and a comparison of both strands. For amino acid sequences, the BLASTP program uses as defaults a wordlength (W) of 3, an expectation (E) of 10, and the BLOSUM62 scoring matrix (see Henikoff and Henikoff (1992) Proc. Natl. Acad. Sci. 89: 10915-10919). Unless otherwise indicated, “sequence identity” here refers to the % sequence identity generated from a tblastx using the NCBI version of the algorithm at the default settings using gapped alignments with the filter “off” (see, for example, NIH NLM NCBI website at www.ncbi.nlm.nih.gov/, supra).

[0088] In addition to calculating percent sequence identity, the BLAST algorithm also performs a statistical analysis of the similarity between two sequences (see, e.g., Karlin and Altschul (1993) Proc. Natl. Acad. Sci. 90: 5873-5787). One measure of similarity provided by the BLAST algorithm is the smallest sum probability (P(N), which provides an indication of the probability by which a match between two nucleotide or amino acid sequences would occur by chance. For example, a nucleic acid is considered similar to a reference sequence (and, therefore, in this context, homologous) if the smallest sum probability in a comparison of the test nucleic acid to the reference nucleic acid is less than about 0.1, or less than about 0.01, and or even less than about 0.001. An additional example of a useful sequence alignment algorithm is PILEUP. PILEUP creates a multiple sequence alignment from a group of related sequences using progressive, pairwise alignments. The program can align, e.g., up to 300 sequences of a maximum length of 5,000 letters.

[0089] The integrated system, or computer, typically includes a user input interface allowing a user to selectively view one or more sequence records corresponding to the one or more character strings, as well as an instruction set which aligns the one or more character strings with each other or with an additional character string to identify one or more region of sequence similarity. The system may include a link of one or more character strings with a particular phenotype or gene function. Typically, the system includes a user readable output element that displays an alignment produced by the alignment instruction set.

[0090] The methods of this invention can be implemented in a localized or distributed computing environment. In a distributed environment, the methods may be implemented on a single computer comprising multiple processors or on a multiplicity of computers. The computers can be linked, but more preferably the computer(s) are nodes on a network. The network can be a generalized or a dedicated local or wide-area network and, in certain preferred embodiments, the computers may be components of an intra-net or an internet, or “cloud” computing platforms like that offered by Amazon Web Services.

[0091] Thus, the invention provides methods for identifying a sequence similar or homologous to one or more polynucleotides as noted herein, or one or more target polypeptides encoded by the polynucleotides, or otherwise noted herein and may include linking or associating a given phenotype such as the capacity for cellular biosynthesis of a target molecule with a sequence. In the methods, a sequence database is provided (locally or across an inter or intranet) and a query is made against the sequence database using the relevant sequences herein and associated phenotypes or functions in the cellular biosynthesis of target molecules.

[0092] Any sequence herein can be entered into the database, before or after querying the database. This provides for both expansion of the database and, if done before the querying step, for insertion of control sequences into the database. The control sequences can be detected by the query to ensure the general integrity of both the database and the query. As noted, the query can be performed using a web browser-based interface. For example, the database can be a centralized public database such as GenBank, or a private database, and the querying can be done from a remote terminal or computer across an internet or intranet.

[0093] Any sequence herein can be used to identify a similar, homologous sequence in a genome such as a target plant genome by the methods identified above. A homologous polynucleotide sequence that has a conserved or equivalent functionality in delivering a desired trait typically has at least 30% or at least 35%, or at least 40%, or at least 45%, or at least 50%, or at least 55%, or at least 60%, 61%, 62%, 63%, 64%, 65%, 66%, 67%, 68%, 69%, 70%, 71%, 72%, 73%, 74%, 75%, 76%, 77%, 78%, 79%, 80%, 81%, 82%, 83%, 84%, 85%, 86%, 87%, 88%, 89%, 90%, 91%, 92%, 93%, 94%, 95%, 96%, 97%, 98%, or at least 99%, or about 100% sequence identity to a polynucleotide sequence encoding a full length polypeptide or the full length of a conserved domain of the full length polypeptide that has been shown to produce a desired trait when overexpressed or knocked out.

### Generation of Genetically Modified Plant Cells and Plants

[0094] Genetically modified cells, plant cells, plant explants, plant tissues plant organs or plants incorporating the polynucleotides of the invention and/or expressing the polypeptides of the invention can be produced by a variety of well-established techniques. Following construction of a transformation vector, most typically an expression cassette, including one or more polynucleotides from the invention, or a segment thereof, standard techniques can be used to introduce the polynucleotide into a cell to create a genetically modified cell or cell line. Optionally, the genetically modified plant cell can be regenerated to produce an explant, tissue, or transgenic plant.

[0095] Transformation and multiplication and/or regeneration of cells is now routine, and the selection of the most appropriate transformation technique will be determined by the practitioner. The choice of method will vary with the organism to be transformed: those skilled in the art will recognize the suitability of particular methods for given organism types. Suitable methods can include, but are not limited to: electroporation of protoplasts; liposome-mediated transformation; polyethylene glycol (PEG) mediated transformation; Li-mediated transformation, transformation using, for example, viruses; micro-injection of cells; micro-projectile bombardment of cells; vacuum infiltration; or Agrobacterium tumefaciens mediated transformation. In this invention, transformation involves introducing a recombinant nucleotide sequence into a host cell in a manner to cause stable or transient expression of the sequence so as to result in expression of the encoded polypeptide which in turn results in the production of a desired target molecule.

[0096] Following transformation, genetically modified cells may be preferably selected using a dominant selectable marker incorporated into the transformation vector. Typically, such a marker will confer antibiotic or herbicide resistance on the transformed cells, and selection of transformants can be accomplished by exposing the cells to appropriate concentrations of the antibiotic or herbicide. Alternatively, color-based markers such as GFP or GUS may be used to select transformed cells, or transformed cells may be selected based on detection of expression of the polynucleotide in the introduced expression cassette by RT-PCR or detection of a target molecule produced by the genetically modified cells.

[0097] Methodologies for the generation of genetically modified plants, including transgenic plants have been reviewed by Keshavareddy et al., 2018, Int. J. Cuff. Microbiol. App. Sci (2018) 7(7): 2656-2668. Detailed methodologies have also been published in U.S. Pat. No. 7,345,217 (Zhang, Mar. 18, 2008), U.S. Pat. No. 7,511,190 (Creelman, et al., Mar. 31, 2009), U.S. Pat. No. 7,196,245 (Jiang, et al., Mar. 27, 2007) and U.S. Pat. No. 7,663,025 (Heard, et al., Feb. 16, 2010).

### Introduction of Targeted Genetic Modifications Through Gene Editing

[0098] A preferred method of practicing the invention is to use genome editing to produce a “targeted genetic modification” as referenced herein. The terms “genome editing”, “genome edited”, “genome modified”, “genetically modified” are used interchangeably to describe plants with specific DNA sequence changes in their genomes wherein those DNA sequence changes include changes of specific nucleotides, the deletion of specific nucleotide sequences or the insertion of specific nucleotide sequences.

[0099] As used herein, a technique for introducing a “targeted genetic modification” refers to any method, protocol, or technique that allows the precise and/or targeted editing at a specific location (also referred to a “locus” or “native locus” in a genome of a plant (i.e., the editing is largely or completely non-random) using a site-specific nuclease, such as a meganuclease, a zinc-finger nuclease (ZFN), an RNA-guided endonuclease (e.g., the CRISPR/Cas9 system), a TALE-endonuclease (TALEN), a recombinase, or a transposase. CRISPR is an acronym for clustered, regularly interspaced, short, palindromic repeats and Cas an abbreviation for CRISPR-associated protein; for a review, see Khandagal and Nadal, Plant Biotechnol. Rep., 2016, 10, 327. Engineered meganucleases, zinc finger nucleases (ZFN), transcription activator-like effector nucleases (TALENs) can also be used. US Patent Application 2016/0032297 provides detailed methodology for these methods. Another gene editing methodology that can be applied uses so-called ARCUS nucleases which leverage the properties of a naturally occurring gene editing enzyme—the homing endonuclease I-CreI—which evolved in nature to make a single, highly specific DNA edit before using its built-in safety switch to shut itself off.

[0100] Genome editing tools can accurately change the architecture of a genome at specific target locations. These tools can be efficiently used for the generation of plants with high crop yields, desired alterations in composition, and resistance to biotic and abiotic stresses. It may be challenging to achieve all desired modifications using a particular genome editing tool. Thus, multiple genome editing tools have been developed to facilitate efficient genome editing. Some of the major genome editing tools used to edit plant genomes are: Homologous recombination (HR), zinc finger nucleases (ZFNs), transcription activator-like effector nucleases (TALENs), pentatricopeptide repeat proteins (PPRs), the CRISPR/Cas9 system, RNA interference (RNAi), cisgenesis, and intragenesis. In addition, site-directed sequence editing and oligonucleotide-directed mutagenesis have the potential to edit the genome at the single-nucleotide level. Recently, adenine base editors (ABEs) have been developed to mutate A-T base pairs to G-C base pairs. ABEs use deoxyadeninedeaminase (TadA) with catalytically impaired Cas9 nickase to mutate A-T base pairs to G-C base pairs. A summary of these methods an applicability is provided by Mohanta et al., Genes (Basel). 2017 December; 8(12): 399.

[0101] Such genome editing methods encompass a wide range of approaches to precisely remove genes, gene fragments, to alter the DNA sequence of coding sequences or control sequences, or to insert new DNA sequences into genes or protein coding regions to reduce or increase the expression of target genes in plant genomes (Belhaj, K. 2013, Plant Methods, 9, 39; Khandagale and Nadal, 2016, Plant Biotechnol Rep, 10, 327). Preferred methods involve the in vivo site-specific cleavage to achieve double stranded breaks in the genomic DNA of the plant genome at a specific DNA sequence using nuclease enzymes and the host plant DNA repair system. Multiple approaches are available for producing double stranded breaks in genomic DNA, and thus achieve genome editing, including the use of the CRISPR/Cas system.

[0102] An extensive overview of the CRISPR/Cas system and useful applications thereof can be found at www.addgene.org/guides/crispr/

[0103] The CRISPR/Cas genome editing system provides flexibility in targeting specific sequences for modification within the genome and enables the execution of a range of different edits including the activation or upregulation of target loci or the knock-out of target loci. The method relies on providing the Cas enzyme and a short guide RNA “gRNA” containing a short guide sequence (˜20 bp), with sequence complementarity to the target DNA sequence in the plant genome. Depending on the type of Cas enzyme, alternatively a DNA, an RNA/DNA hybrid, or a double stranded DNA guide polynucleotide can be used. The guide portion of this guide polynucleotide directs the Cas enzyme to the desired cut site for cleavage with a recognition sequence for binding the Cas enzyme.

[0104] The target in the plant genome can be any ˜20 nucleotide DNA sequence, provided that the sequence is unique compared to the rest of the genome and also that the target is present immediately adjacent to a Protospacer Adjacent Motif (PAM). The PAM sequence serves as a binding signal for Cas9, but the exact sequence depends on which Cas protein is being used. A list of Cas proteins and PAM sequences can be found at www.addgene.org/guides/crispr/#pam-table

[0105] The simplest application of CRISPR/Cas is to produce knockout or loss of function alleles in a target locus. The gRNA targets the Cas enzyme to a specific locus in the genome, which then produces a double stranded break. The resulting DSB is then repaired by one of the general repair pathways present in the cell. This typically causes small nucleotide insertions or deletions (indels) at the DSB site. In most cases, small indels in the target DNA result in amino acid deletions, insertions, or frameshift mutations leading to premature stop codons within the open reading frame (ORF) of the targeted gene. The ideal result is a loss-of-function mutation within the targeted gene. However, the strength of the knockout phenotype for a given mutant cell must be validated experimentally, for example for testing for the presence of transcript from the target ORF by RT-PCR or hybridization-based approaches. These features make the CRISPR/Cas system a suitable tool for knockout of uORFs.

[0106] CRISPR/Cas can also be used to produce more sophisticated changes to the native sequence at targeted loci in the genome. This can involve inserting sequences, replacing sequences or editing specific bases so as to insert or create new domains within a polypeptide encoded at a desired locus. One way to introduce such changes is to make use of the high fidelity but low efficiency high fidelity homology directed (HDR) repair pathway within the cell. In order to make such precise modifications using HDR, a DNA repair template incorporating the desired genome modification that the practitioner desires to create at the target locus must be delivered into the cell type of interest with the gRNA(s) and Cas9 or Cas9 nickase. The repair template must contain the desired edit as well as additional homologous sequence immediately upstream and downstream of the target (termed left and right homology arms). The length of each homology arm is dependent on the size of the change being introduced, with larger insertions requiring longer homology arms. Since the efficiency of Cas9 cleavage is relatively high and the efficiency of HDR is relatively low, a large portion of the Cas9-induced DSBs will be repaired to produce edits not comprising the specific desired change. Thus, an additional confirmation/screening step is required to select one of more cells from the edited population that contain the desired change. These cells then can be regenerated into a population of cells, a tissue, organ or whole plant or plant population. Such selection can be achieved by incorporating a marker sequence into the edit, which is readily screened or by PCR or hybridization-based methods.

[0107] CRISPR-related gene editing systems can also be deployed to change specific bases without the need for double stranded breaks. Such approaches are referred to in the art as “base editing” systems. Base editing enables the irreversible conversion of a specific DNA base into another at a targeted genomic locus, for example conversing C to T, or A to G. Unlike other genome-editing tools, base editing can be achieved without double-strand breaks. When introducing a point mutation at a target locus, base editing is more efficient than traditional genome editing techniques. Since many genetic diseases arise from point mutations, base editing has important applications in disease research. Using these systems, the skilled practitioner can create a targeted genetic modification comprising an amino acid substitution or the creation of start or stop codon.

[0108] To avoid relying on HDR, which has low efficiency, researchers have developed two classes of base editors: cytosine base editors (CBEs) and adenine base editors (ABEs). Cytosine base editors are created by fusing Cas9 nickase or catalytically inactive “dead” Cas9 (dCas9) to a cytidine deaminase like APOBEC. As with traditional CRISPR techniques, base editors are targeted to a specific locus by a gRNA, and they can convert cytidine to uridine within a small editing window near the PAM site. Uridine is subsequently converted to thymidine through base excision repair, creating a C to T change. Likewise, adenosine base editors have been engineered to convert adenosine to inosine, which is treated like guanosine by the cell, creating an A to G change.

[0109] Adenine DNA deaminases do not exist in nature, but these enzymes have been created by directed evolution of the Escherichia coli TadA, a tRNA adenine deaminase. Like cytosine base editors, the evolved TadA domain is fused to a Cas9 protein to create the adenine base editor. Both types of base editors are available with multiple Cas9 variants including high fidelity Cas9's. Further advancements have been made by optimizing expression of the fusions, modifying the linker region between Cas variant and deaminase to adjust the editing window, or adding fusions that increase product purity such as the DNA glycosylase inhibitor (UGI) or the bacteriophage Mu-derived Gam protein (Mu-GAM).

[0110] While many base editors are designed to work in a very narrow window proximal to the PAM sequence, some base editing systems create a wide spectrum of single-nucleotide variants (somatic hypermutation) in a wider editing window, and are thus well suited to directed evolution applications. Examples of these base editing systems include targeted AID-mediated mutagenesis (TAM) and CRISPR-X, in which Cas9 is fused to activation-induced cytidine deaminase (AID).

[0111] Other CRISPR systems, specifically the Type VI CRISPR enzymes Cas13a/C2c2 and Cas13b, target RNA rather than DNA. Fusing a hyperactive adenosine deaminase that acts on RNA, ADAR2(E488Q), to catalytically dead Cas13b creates a programmable RNA base editor that converts adenosine to inosine in RNA (termed REPAIR). Since inosine is functionally equivalent to guanosine, the result is an A->G change in RNA. The catalytically inactive Cas13b ortholog from Prevotella sp., dPspCas13b, does not appear to require a specific sequence adjacent to the RNA target, making this a very flexible editing system. Editors based on a second ADAR variant, ADAR2(E488Q/T375G), display improved specificity, and editors carrying the delta-984-1090 ADAR truncation retain RNA editing capabilities and are small enough to be packaged in AAV particles.

[0112] In the context of this description, it is recognized that the term Cas nuclease includes any nuclease which site-specifically recognizes CRISPR sequences based on gRNA or DNA sequences and includes Cas9, Cpf1 and others described below. Many authors have identified that CRISPR/Cas genome editing, is a preferred way to edit the genomes of complex organisms (Sander and Joung, 2013, Nat Biotech, 2014, 32, 347; Wright et al., 2016, Cell, 164, 29) including plants (Zhang et al., 2016, Journal of Genetics and Genomics, 43, 151; Puchta 2016, Plant J., 87, 5; Khandagale and Nadaf, 2016, Plant Biotechnol. Rep., 10, 327). US Patent Application 2016/020822 provides extensive description of the materials and methods useful for genome editing in plants using the CRISPR/Cas9 system and describes many of the uses of the CRISPR/Cas9 system for genome editing of a range of gene targets in crops.

[0113] It is further recognized that many variations of the CRISPR/Cas system can be used for applying the invention herein, including the use of wild-type Cas9 from Streptococcus pyogenes (Type II Cas) (Barakate and Stephens, 2016, Frontiers in Plant Science, 7, 765; Bortesi and Fischer, 2015, Biotechnology Advances 5, 33, 41; Cong et al., 2013, Science, 339, 819; Rani et al., 2016, Biotechnology Letters, 1-16; Tsai et al., 2015, Nature biotechnology, 33, 187). Other examples include Tru-gRNA/Cas9 in which off-target mutations are significantly decreased (Fu et al., 2014, Nature biotechnology, 32, 279; Osakabe et al., 2016, Scientific Reports, 6, 26685; Smith et al., 2016, Genome biology, 17, 1; Zhang et al., 2016, Scientific Reports, 6, 28566), a high specificity Cas9 (mutated S. pyogenes Cas9) with little to no off target activity (Kleinstiver et al., 2016, Nature 529, 490; Slaymaker et al., 2016, Science, 351, 84). Further variations comprise the Type I and Type III systems in which multiple Cas proteins are expressed to achieve editing (Li et al., 2016, Nucleic acids research, 44:e34; Luo et al., 2015, Nucleic acids research, 43, 674), the Type V Cas system using the Cpf1 enzyme (Kim et al., 2016, Nature biotechnology, 34, 863; Toth et al., 2016, Biology Direct, 11, 46; Zetsche et al., 2015, Cell, 163, 759), DNA-guided editing using the NgAgo Argonaute enzyme from Natronobacterium gregoryi that employs guide DNA (Xu et al., 2016, Genome Biology, 17, 186), and the use of a two vector system in which Cas9 and gRNA expression cassettes are carried on separate vectors (Cong et al., 2013, Science, 339, 819). A unique nuclease Cpf1, an alternative to Cas9 has advantages over the Cas9 system in reducing off-target edits which creates unwanted mutations in the host genome. Examples of crop genome editing using the CRISPR/Cpf1 system include rice (Tang et. al., 2017, Nature Plants 3, 1-5; Wu et. al., 2017, Molecular Plant, Mar. 16, 2017) and soybean (Kim et., al., 2017, Nat Commun. 8, 14406). Other authors have described the use of Argonaute related proteins as an alternative to CRISPR systems for gene editing (Hegge et al. Nature Rev. Microbiol. 2017. Epub 2017/07/25. pmid: 28736447; Swarts et al. Nucleic Acids Res. 2015; 43(10):5120-9. Epub 2015/05/01. pmid: 25925567; Swarts et al. Nature. 2014; 507(7491):258-61. Epub 2014/02/18. pmid: 24531762. See also PCT Application Number PCT/US2019/025163 and/or Publication Number WO2019204266A1.

[0114] Detailed methodologies for gene editing in plants to create new crop traits, including the selection of cells containing the desired edits, and methods for introducing the CRISPR system components into an initial target plant cell are set forth in published patent application WO2019195157. As specified therein, the “guide polynucleotide” in a CRISPR system also relates to a polynucleotide sequence that can form a complex with a Cas endonuclease and enables the Cas endonuclease to recognize and optionally cleave a DNA target site. The guide polynucleotide can be a single molecule (i.e., a single guide RNA (gRNA) that is a synthetic fusion between a crRNA and part of the tracrRNA sequence) or two molecules (i.e., the crRNA and tracrRNA as found in natural Cas9 systems in bacteria). The guide polynucleotide sequence can be provided as an RNA sequence or can be transcribed from a DNA sequence to produce an RNA sequence. The guide polynucleotide sequence can also be provided as a combination RNA-DNA sequence (see for example, Yin, H. et al., 2018, Nature Chemical Biology, 14, 311). As used herein “guide RNA” sequences comprise a variable targeting domain, called the “guide”, complementary to the target site in the genome, and an RNA sequence that interacts with the Cas9 or Cpf1 endonuclease, called the “guide RNA scaffold”. A guide polynucleotide that solely comprises ribonucleic acids is also referred to as a “guide RNA”. As used herein the “guide target sequence” refers to the sequence of the genomic DNA adjacent to a PAM site, where the gRNA will bind to cleave the DNA. The “guide target sequence” is often complementary to the “guide” portion of the gRNA, however several mismatches, depending on their position, can be tolerated and still allow Cas mediated cleavage of the DNA. The method also provides introducing single guide RNAs (gRNAs) into plants. The single guide RNAs (gRNAs) include nucleotide sequences that are complementary to the target chromosomal DNA. The gRNAs can be, for example, engineered single chain guide RNAs that comprise a crRNA sequence (complementary to the target DNA sequence) and a common tracrRNA sequence, or as crRNA-tracrRNA hybrids. The gRNAs can be introduced into the cell or the organism as a DNA with an appropriate promoter, as an in vitro transcribed RNA, or as a synthesized RNA. Basic guidelines for designing the guide RNAs for any target gene of interest are well known in the art as described for example by Brazelton et al. (Brazelton, V. A. et al., 2015, GM Crops & Food, 6, 266-276) and Zhu (Zhu, L. J. 2015, Frontiers in Biology, 10, 289-296).

[0115] Published patent applications WO2019195157 and WO2019204266A1 also provides example of the types of mutation that can lead to increased activity of transcription factor polypeptides. These include mutations to the coding sequence that give rise to amino acid changes in the encoded protein.

[0116] In certain preferred embodiments of the present invention, the guide polynucleotide/Cas endonuclease system can be used to allow for the insertion of a promoter or promoter element, such as an enhancer element, of any one the transcription factor sequences of the invention, wherein the promoter insertion (or promoter element deletion) results in any one of the following or any one combination of the following: a permanently activated gene locus, an increased promoter activity (increased promoter strength), an increased promoter tissue specificity, a decreased promoter tissue specificity, a new promoter activity, an extended window of gene expression, a modification of the timing or developmental progress of gene expression, a mutation of DNA binding elements and/or an addition of DNA binding elements.

[0117] The guide RNA/Cas endonuclease system can be used to allow for the insertion of a promoter element to increase the expression of the transcription factor sequences of the invention. Promoter elements, such as enhancer elements, are often introduced in promoters driving gene expression cassettes in multiple copies for trait gene testing or to produce transgenic plants expressing specific traits. Enhancer elements can be, but are not limited to, a 35S enhancer element (Benfey et al, EMBO J., 1989; 8: 2195-2202). In some plants (events), the enhancer elements can cause a desirable phenotype, a yield increase, or a change in expression pattern of the trait of interest that is desired. It may be desired to remove the extra copies of the enhancer element while keeping the trait gene cassettes intact at their integrated genomic location. The guide RNA/Cas endonuclease can be used to remove the unwanted enhancing element from the plant genome. A guide RNA can be designed to contain a variable targeting region targeting a target site sequence of 12-30 bps adjacent to a NGG (PAM) in the enhancer. The Cas endonuclease can make cleavage to insert one or multiple enhancers.

[0118] To repress the function of a target uORF and activate the downstream mORF, bases can be deleted from the uORF, or additional stop codons can be created. Other mutations or edits that may be used to repress the function of a target uORF include mutations of the start ATG codon, amino acid deletions, insertions, or frameshift mutations leading to premature stop codons or any of a number of deleterious mutations within the uORF. In some cases, it may be optimum to substitute bases within a uORF to produce an optimized phenotype whereby an increased yield, increased stress tolerance, or altered biochemical composition may be obtained without substantial off types such as, for example, organ abnormalities or dwarfing.

Delivery of Gene Editing Components into Plant Cells and Plants:

[0119] Sandhya et al. 2020. J. Genet. Eng. Biotechnol. 18: 25. Published online 2020 Jul. 7. doi: 10.1186/s43141-020-00036-8, present methods for delivering gene editing tools such CRISPR/Cas9 components into plants to execute the gene editing process. The effective delivery of CRISPR/Cas9 components, including the guide sequence, the CAS9, and where applicable a DNA-repair template containing the desired sequence edit, into plant cells is critical for editing to be efficient. The practitioner can select from a variety of delivery methods to introduce the gene editing components into plant cells. These include Agrobacterium-mediated transformation, bombardment or biolistic methods of transformation, floral-dip, and PEG-mediated protoplast transformation. Additional methods include nanoparticle and pollen magnetofection-mediated delivery systems (Kwak et ai., 2019, Nature Nanotechnology, DOI 10.1038/S41565-019-0375-4) (Demirer et al, 2019, Nature Nanotechnology, DOI 10.1038/S41565-019-0382-5) can be used. CRISPR constructs can be coated onto gold particles for gene gun mediated introduction into plant cells, CRISPR constructs can be transfected into protoplasts using PEG, or introduced via an Agrobacterium strain harboring a CRISPR vector. Components may also be introduced via floral dip (Castel et al., 2019. PLoS One 14:e0204778) or a pollen-tube tube pathway-based method. In the next step, a plant or plant cell containing a targeted genetic modification produced by the introduced CRISPR system is selected. This may involve regenerating a cell containing the modification into an explant, a plant tissue, or whole plant. In some instances, this procedure involves selecting explants harboring the genome edit on selection plates and regenerating a whole plant. Finally, PCR and Sanger sequencing are generally used for confirmation that the desired sequence edit has been successfully introduced into the selected plant. The selected plant is then examined to confirm that it exhibits the target trait of interest that was initially sought by introducing the genome modification.

[0120] Sandhya et al. 2020. J. Genet. Eng. Biotechnol. 18: 25. Published online 2020 Jul. 7. doi: 10.1186/s43141-020-00036-8, present tables showing which methods can be successfully applied to particular crops. For example, the following plants can all be successfully gene edited using PEG mediated delivery of CRISPR system components: Apple, Brassica oleracea, Brassica rapa, Citrullus lanatus, Glycine max, Grapevine, Oryza sativa, Petunia, Physcomitrella patens, Solanum lycopersicum, Triticum aestivum, and Zea mays. By way of further example, the following plants can all be successfully gene edited using particle bombardment mediated delivery of CRISPR system components: Glycine max, Hordeum vulgare, Oryza sativa, Triticum aestivum and Zea mays. By way of yet further example, the following plants can all be successfully gene edited using particle bombardment mediated delivery of CRISPR system components: Arabidopsis thaliana, Banana, Citrus sinensis, Cucumis sativum, Glycine max, Kiwi fruit, Lotus japonicus, Marchantia polymorpha, Medicago truncatula, Nicotiana benthamaina, Nicotiana tabacum, Oryza sativa, Populus, Salvia miltiorrhiza, Solanum lycopersicum, Solanum lycopersicum, Sorghum bicolor, Triticum aestivum, and Zea mays.

Activation of Polypeptides and their Homologs Through Targeted Genetic Modifications that Comprise the Mutation of uORFs:

[0121] Upstream ORFs (uORFs) comprise short sections of mRNAs that reside within the 5′ UTR or upstream region of a gene encoding a regulatory protein of interest (the coding sequence of which is often referred to as the main ORF or mORF). The uORF can be in frame or out-of-frame with the main coding sequence of the gene of interest. A substantial proportion of eukaryotic mRNAs contain uORFs in the 5′ leader sequence preceding the main functional protein-encoding ORF (Kochetov, 2008, BioEssays 30: 683-691). uORFs often encode short peptides which negatively regulate the activity of the regulatory proteins encoded by the genes of which they are upstream. Furthermore, uORFs sometimes initiate at a non-canonical codon (e.g., ACG rather than AUG) and the encoded peptide is often much less than 100 residues in length. These features make uORFs challenging to identify via automated bioinformatic searches, and experimentation is typically needed to confirm that a putative uORF functions as a negative regulator of a downstream coding sequence. For example, Laing et al., 2015. Plant Cell 27: 772-786; DOI: 10.1105/tpc.114.133777, removed a uORF that encodes a 60- to 65-residue peptide in the upstream region of GGP in lettuce, and showed this was sufficient to deliver a trait comprising increase levels of ascorbate. In fact, the peptides encoded by uORFs are very short indeed in some instances; for example, in humans, a functional peptide of only 6 amino acids was identified as being encoded by a uORF. Several plant uORFs have been shown to modulate mORF translation in response to the levels of various key metabolites within the cell (e.g., polyamines, sucrose, phosphocholine and ascorbate). A proposed function of several of the peptides encoded by these uORFs is to slow or stall the ribosomes and as a consequence limit translation of the downstream main ORF which encodes to regulatory protein (see Hellens et al., 2016. Trends Plant Sci., 21:317-328. dx.doi.org/10.1016/j.tplants.2015.11.005, and references therein).

[0122] Recently, it has been proposed that gene editing of uORFs may offer a general approach to activate crop genes to produce traits of interest in a highly targeted manner (Zhang and Voytas, 2019, Natl. Sci. Rev. 6: 391, doi.org/10.1093/nsr/nwy123). In particular, this can avoid many of the drawbacks associated with traditional approaches, which often involve large insertions of foreign DNA fragments, such as sequences of strong promoters, enhancers or engineered artificial transcription activators, in the genome. Indeed, many of the problems associated with genetic modifications that comprise transgene integrations, including lack of consumer acceptance of GM products, may be eliminated in a next generation of crop traits produced through knock-out of uORFs in regulator genes by targeted gene editing.

[0123] An increasing number of uORFs are being identified in the upstream regions of genes that encode transcriptional regulators and, in many cases, the uORF and/or its encoded short peptide appear to be controlled by a metabolic signal (van der Horst 2020. Plant Physiol. 182: 110-122, Published online 2019 Aug. 26. doi: 10.1104/pp.19.00940 and references therein). These include these the S1-group bZIPs, including the (HG1) bZIP transcription factor, which controls amino acid and sugar metabolism and which in turn has its activity regulated by sucrose. SAC51 (HG15) is bHLH transcription factor which is involved in xylem differentiation and regulated in response to thermospennine. Another example is the HsfB1/TBF1 (HG18) HSF transcription factor which is involved in heat tolerance and growth-to-defense transition which is regulated by galactinol.

[0124] A further example of transcription factor regulation by uORFs concerns a group of uORF-containing genes identified in the AUXIN RESPONSE FACTOR transcription factor family (Hellens 2016. Trend Plant Sci. 21:317-328; Schepetilnikov, M. et al. 2013, EMBO J. 32: 1087-1102; Nishimura, T. et al., 2005. Plant Cell 17: 2940-2953; Zhou, F. et al., 2010. BMC Plant Biol. 10: 193).

[0125] uORFs have also been identified as important in regulating the activity of transcription factors that control the light response, including transcription factors from the bZIP family (Kurihara et al., 2018. Proc. Natl. Acad. Sci. 115:7831-7836).

[0126] It should be noted that an additional confirmation/selection step is required to select one of more cells from the edited population that contain the desired change. These cells then can be regenerated into a population of cells, a tissue, organ or whole plant or plant population, which optionally, can be further screened to select plants which display the desired trait that is produced by the gene editing of a uORF sequence.

Traits that May be Modified

[0127] Trait modifications of particular interest include those to seed (such as embryo or endosperm), fruit, root, flower, leaf, stem, shoot, seedling or the like, including: enhanced tolerance to environmental conditions including freezing, chilling, heat, drought, water saturation, radiation and ozone; improved tolerance to microbial, fungal or viral diseases; improved tolerance to pest infestations, including insects, nematodes, mollicutes, parasitic higher plants (e.g. witchweed) or the like; decreased herbicide sensitivity; improved tolerance of heavy metals or enhanced ability to take up heavy metals; improved growth under poor photoconditions (e.g., low light and/or short day length), or changes in expression levels of genes of interest. Other phenotype that can be modified relate to the production of plant metabolites, such as variations in the production of taxol, tocopherol, tocotrienol, sterols, phytosterols, vitamins, wax monomers, anti-oxidants, amino acids, lignins, cellulose, tannins, prenyl lipids (such as chlorophylls and carotenoids), glucosinolates, and terpenoids, enhanced or compositionally altered protein or oil production (especially in seeds), or modified sugar (insoluble or soluble) and/or starch composition. Physical plant characteristics that can be modified include cell development (such as the number of trichomes), fruit and seed size and number, yields of plant parts such as stems, leaves, inflorescences, and roots, the stability of the seeds during storage, characteristics of the seed pod (e.g., susceptibility to shattering), root hair length and quantity, internode distances, or the quality of seed coat. Plant growth characteristics that can be modified include growth rate, germination rate of seeds, vigor of plants and seedlings, leaf and flower senescence, male sterility, apomixis, flowering time, flower abscission, rate of nitrogen uptake, osmotic sensitivity to soluble sugar concentrations, biomass or transpiration characteristics, as well as plant architecture characteristics such as apical dominance, branching patterns, number of organs, organ identity, organ shape or size.

### EXAMPLES

[0128] The invention, now being generally described, will be more readily understood by reference to the following examples, which are included merely for purposes of illustration of certain aspects and embodiments of the present invention and are not intended to limit the invention. It will be recognized by one of skill in the art that a genetic modification that is associated with a particular first trait may also be associated with at least one other, unrelated and inherent second trait which was not predicted by the first trait.

### Example 1

### Identifying the Presence of an Upstream Open Reading Frame.

[0129] 1A. A method of identifying the presence of an upstream open reading frame (uORF) through application of an algorithm to ribosome profiling data, wherein the algorithm identifies the presence of the uORF based on the existence of ribosome enrichment in the interval from one stop codon to the next stop codon within the same open reading frame.
[0130] 1B. The method of Statement 1A, wherein the identified uORF, or a uORF upstream of a main ORF that encodes a polypeptide that is at least 30% or at least 35%, or at least 40%, or at least 45%, or at least 50%, or at least 55%, or at least 60%, 61%, 62%, 63%, 64%, 65%, 66%, 67%, 68%, 69%, 70%, 71%, 72%, 73%, 74%, 75%, 76%, 77%, 78%, 79%, 80%, 81%, 82%, 83%, 84%, 85%, 86%, 87%, 88%, 89%, 90%, 91%, 92%, 93%, 94%, 95%, 96%, 97%, 98%, or at least 99%, or about 100% identical to a polypeptide encoded by a main ORF that is operably linked to the identified uORF, is mutated in a cell, and said mutation results in increased translation of the main ORF that is operably linked to the uORF.
[0131] 1C. The method of Statement 1B, wherein the uORF is mutated by introducing at least one gene edit in the uORF.

### Example 2

Reducing the Function of uORFs in Plants
[0132] 2A. The method of Statement 1A or Statement 1B, wherein the uORF is mutated n a plant, and said loss or reduction of function of the uORF results in increased translation of a polypeptide-encoding polynucleotide that is operably linked to the uORF.
[0133] 2B. The method of Statement 2A wherein the polynucleotide encodes a polypeptide the expression of which confers cell death, inhibition of cell division, or an Improved Trait selected from the group consisting of:
   [0134] a yield increase, improved flavor, improved texture, altered circadian rhythm, accelerated flowering, accelerated senescence, delayed senescence, increased branching, reduced branching, increased apical dominance, reduced apical dominance, shade tolerance, increased root mass, increased root hair number, increased vegetative mass, increased fruit mass, improved fruit quality, increased germination rate, increased trichome length, reduced trichome length, reduced thorns, reduced spines, thornless, altered leaf shape, increased leaf number, reduced leaf number, altered leaf angle, altered leaf position, altered branch angle, increased peelability, reduced cellular adhesion, increased cellular adhesion, reduced peel thickness, reduced fruit skin thickness, increased fruit skin thickness, increased seed coat thickness, reduced seed coat thickness, seedless, reduced seed size, increased seed size, apomixis, increased embryogenesis, increased susceptibility to transgenic transformation, increased callus formation, increased embryo formation, increased root formation, increased cell division, reduced cell division, sterility, male sterility, inviable pollen, lack of stamens, lack of carpels, increased carpel number, increased petal number, reduced petal number increased trichome number, reduced trichome number, increased stem width, reduced stem width, increased internode length, reduced internode length, increased floral organ size, altered floral organ shape, reduced floral organ size, reduced fruit abscission, reduced pod shattering, altered organ abscission, variegation, increased hypocotyl length, reduced hypocotyl length, delayed flowering, elimination of flowering, sterility, improved osmotic stress tolerance, improved photosynthesis, improved nitrogen use efficiency, improved phosphorus use efficiency, improved potassium use efficiency, increased nutrient use efficiency, increased nutrient uptake, increased uptake of a metal ion, increased sequestration of a heavy metal, improved oxidative stress tolerance, increased pigment level, improved salt tolerance, improved cold tolerance, improved tolerance of freezing damage, improved freezing tolerance, improved dehydration stress, drought tolerance, improved recovery following drought, decreased wilting, increased plastid number, increased chlorophyll content, increased thylakoid density, increased photosynthetic capacity, increased respiration, reduced respiration, increased photorespiration, reduced photorespiration, increased transpiration, reduced transpiration, increased stomatal conductivity, reduced stomatal conductivity, increased carbon fixation, increased carbon sequestration, increased photosynthetic rate, increased carotenoid level, reduced carotenoid level, increased electron transport, improved non-photochemical quenching, increased ion transport, reduced ion transport, altered carbon to nitrogen balance, increased sensitivity to a hormone, reduced sensitivity to a hormone, reduced sensitivity to ethylene, increased auxin level, reduced auxin level, increased auxin transport, increased auxin sensitivity, reduced auxin sensitivity, increased gibberellin level, reduced gibberellin increased gibberellin sensitivity, reduced gibberellin sensitivity, increased abscisic acid level, reduced abscisic acid level, increased abscisic acid sensitivity, reduced abscisic acid sensitivity, increased cytokinin level, reduced cytokinin level, increased cytokinin level, reduced cytokinin level, increased cytokinin sensitivity, reduced cytokinin sensitivity, increased jasmonate level, reduced jasmonate level, increased jasmonate sensitivity, reduced jasmonate sensitivity, increased salicylic acid level, reduced salicylic acid level, reduced salicylic acid sensitivity, increased salicylic acid sensitivity, increased strigolactone level, reduced strigolactone level, increased sensitivity to strigolactone, reduced sensitivity to strigolactone, reduced sensitivity to ethylene, increased sensitivity to ethylene, accelerated ripening, delayed ripening, reduced fruit spoilage, increased shelf life, improved heat stress, improved tolerance to low nitrogen conditions, increased seedling vigor, increased disease resistance, increased resistance to a fungal pathogen, increased resistance to bacterial pathogen, increased resistance to a viral pathogen, increased resistance to Botrytis; increased resistance to Erysiphe; increased resistance to Fusarium; increased resistance to Sclerotinia; increased rust resistance, increased resistance to Phytophthora, increased resistance to black sigatoka, increased resistance to Xanthomonas, increased resistance to a necrotrophic fungus, increased resistance to a biotrophic fungus, increase nematode resistance, increased insect resistance, herbivore resistance, increased mollusk resistance, increased protein levels, increased oil levels, reduced lignin level, increased THC level, increased CBD level, increased anthocyanin level, reduced anthocyanin level, increased nutrient level in tissue, increased vitamin level in tissue, increased carbohydrate level, reduced level of a carbohydrate, increased starch level, increased sugar level, increased BRIX, increased protein level, reduced protein level, increased level of a metabolite, increased level of photosynthetic pigments, increased lipid level, reduced lipid level, altered fatty acid saturation, increased level of saturated fat, reduced level of saturated fat, increased tocopherol level, reduced tocopherol level, increased prenyl lipid levels, increased nutritional content of tissues, increased processability, increased calorific value, reduced levels of chlorine, increased alkaloid level, reduced alkaloid level, increased wax level, reduced wax level, increased wax ester level, increased tannin level, increased taxol level, increased xanthophyll levels, increased bioplastic levels, increased level of a biopolymer, reduced levels or a biopolymer, altered starch composition, increased latex level, and increased rubber level.
[0135] 2C. The method of Statement 2B, wherein the uORF regulates translation of the polynucleotide and derepression of said translation results in a toxic effect or cell death in the plant.
[0136] 2D. The method of Statement 2B, wherein the plant is a weed or other undesirable plant.
[0137] 2E. The method of Statement 2B, wherein the uORF regulates translation of the polynucleotide and the increased translation results in delayed flowering time or bolting in the plant as compared to a reference or control plant of the same species.
[0138] 2F. The method of Statement 2B, wherein the uORF regulates translation of the polynucleotide and the increased translation results in earlier flowering time in the plant as compared to a reference or control plant of the same species.
[0139] 2G. The method of any of Statements 2A-2F, wherein the plant is a crop plant, a fruit crop, a grain crop, a forage crop, a forest crop, an energy crop, a turf plant, a weed plant, a woody plant, a monocot plant, a dicot plant, an alga, a grass, an ornamental plant, a leafy plant, lettuce, a salad green, a pine, a eucalyptus, tomato, alfalfa, soybean, clover, carrot, celery, parsnip, cabbage, radish, rapeseed, broccoli, melon, cucumber, wheat, corn, cotton, rice, barley, millet, rye, potato, tomato, tobacco, sugar beet, sugar cane, Miscanthus, energy cane, bamboo, switchgrass, miscane, jatropha, Bermuda grass, lentil, chickpea, a pea, a bean, pepper, strawberry, blackberry, raspberry, blueberry, banana, pineapple, a Citrus, a nut crop, Hevea, oil palm, a coffee plant, a cocoa plant, a tea plant, or a plant that is a member of the family Solanaceae, Leguminosae, Umbelliferae, Curcurbitaceae, Gramineae, or Cruciferae.
[0140] 2H. A method for increasing the yield, size, grain yield, seed yield, or biomass of a plant, wherein the plant is produced by any of the methods of Statements 2A-2G.
[0141] 2I. A plant produced by the method of any of Statements 2A-2H.
[0142] 2J. A plant or plant cell comprising:
   [0143] an introduced targeted genetic modification at a native genomic locus that comprises a mutation in a uORF, wherein the native genomic locus comprises an operably linked main ORF, downstream of the uORF, wherein the main ORF encodes a polypeptide with regulatory activity comprising an amino acid sequence with a percentage identity to a polypeptide selected from the group consisting of SEQ ID NO: 3999-5227.
   [0144] wherein the percentage identity is at least 30% or at least 35%, or at least 40%, or at least 45%, or at least 50%, or at least 55%, or at least 60%, 61%, 62%, 63%, 64%, 65%, 66%, 67%, 68%, 69%, 70%, 71%, 72%, 73%, 74%, 75%, 76%, 77%, 78%, 79%, 80%, 81%, 82%, 83%, 84%, 85%, 86%, 87%, 88%, 89%, 90%, 91%, 92%, 93%, 94%, 95%, 96%, 97%, 98%, or at least 99%, or about 100%; and
   [0145] the targeted genetic modification to the uORF increases expression level and/or activity of the encoded polypeptide with regulatory activity.
[0146] 2K. A crop, turf, weed, or ornamental plant containing an introduced targeted genetic modification comprising a non-native allele that further comprises a mutation within a uORF that is operably linked to a polynucleotide comprising a main ORF that encodes a polypeptide with cellular regulatory activity that has an amino acid sequence identity to a sequence selected from the group consisting of SEQ ID NO: 3999-5227; and
   [0147] wherein said genetically modified plant exhibits an Improved Trait selected from the group consisting of:
   [0148] a yield increase, improved flavor, improved texture, altered circadian rhythm, accelerated flowering, accelerated senescence, delayed senescence, increased branching, reduced branching, increased apical dominance, reduced apical dominance, shade tolerance, increased root mass, increased root hair number, increased vegetative mass, increased fruit mass, improved fruit quality, increased germination rate, increased trichome length, reduced trichome length, reduced thorns, reduced spines, thornless, altered leaf shape, increased leaf number, reduced leaf number, altered leaf angle, altered leaf position, altered branch angle, increased peelability, increased cell death, increased leaf senescence, reduced cellular adhesion, increased cellular adhesion, reduced peel thickness, reduced fruit skin thickness, increased fruit skin thickness, increased seed coat thickness, reduced seed coat thickness, seedless, reduced seed size, increased seed size, apomixis, increased embryogenesis, increased susceptibility to transgenic transformation, increased callus formation, increased embryo formation, increased root formation, increased cell division, reduced cell division, sterility, male sterility, inviable pollen, lack of stamens, lack of carpels, increased carpel number, increased petal number, reduced petal number increased trichome number, reduced trichome number, increased stem width, reduced stem width, increased internode length, reduced internode length, increased floral organ size, altered floral organ shape, reduced floral organ size, reduced fruit abscission, reduced pod shattering, altered organ abscission, variegation, increased hypocotyl length, reduced hypocotyl length, delayed flowering, elimination of flowering, sterility, improved osmotic stress tolerance, improved photosynthesis, improved nitrogen use efficiency, improved phosphorus use efficiency, improved potassium use efficiency, increased nutrient use efficiency, increased nutrient uptake, increased uptake of a metal ion, increased sequestration of a heavy metal, improved oxidative stress tolerance, increased pigment level, improved salt tolerance, improved cold tolerance, improved tolerance of freezing damage, improved freezing tolerance, improved dehydration stress, drought tolerance, improved recovery following drought, decreased wilting, increased plastid number, increased chlorophyll content, increased thylakoid density, increased photosynthetic capacity, increased respiration, reduced respiration, increased photorespiration, reduced photorespiration, increased transpiration, reduced transpiration, increased stomatal conductivity, reduced stomatal conductivity, increased carbon fixation, increased carbon sequestration, increased photosynthetic rate, increased carotenoid level, reduced carotenoid level, increased electron transport, improved non-photochemical quenching, increased ion transport, reduced ion transport, altered carbon to nitrogen balance, increased sensitivity to a hormone, reduced sensitivity to a hormone, reduced sensitivity to ethylene, increased auxin level, reduced auxin level, increased auxin transport, increased auxin sensitivity, reduced auxin sensitivity, increased gibberellin level, reduced gibberellin increased gibberellin sensitivity, reduced gibberellin sensitivity, increased abscisic acid level, reduced abscisic acid level, increased abscisic acid sensitivity, reduced abscisic acid sensitivity, increased cytokinin level, reduced cytokinin level, increased cytokinin level, reduced cytokinin level, increased cytokinin sensitivity, reduced cytokinin sensitivity, increased jasmonate level, reduced jasmonate level, increased jasmonate sensitivity, reduced jasmonate sensitivity, increased salicylic acid level, reduced salicylic acid level, reduced salicylic acid sensitivity, increased salicylic acid sensitivity, increased strigolactone level, reduced strigolactone level, increased sensitivity to strigolactone, reduced sensitivity to strigolactone, reduced sensitivity to ethylene, increased sensitivity to ethylene, accelerated ripening, delayed ripening, reduced fruit spoilage, increased shelf life, improved heat stress, improved tolerance to low nitrogen conditions, increased seedling vigor, increased disease resistance, increased resistance to a fungal pathogen, increased resistance to bacterial pathogen, increased resistance to a viral pathogen, increased resistance to Botrytis; increased resistance to Erysiphe; increased resistance to Fusarium; increased resistance to Sclerotinia; increased rust resistance, increased resistance to Phytophthora, increased resistance to black sigatoka, increased resistance to Xanthomonas, increased resistance to a necrotrophic fungus, increased resistance to a biotrophic fungus, increase nematode resistance, increased insect resistance, herbivore resistance, increased mollusk resistance, increased protein levels, increased oil levels, reduced lignin level, increased THC level, increased CBD level, increased anthocyanin level, reduced anthocyanin level, increased nutrient level in tissue, increased vitamin level in tissue, increased carbohydrate level, reduced level of a carbohydrate, increased starch level, increased sugar level, increased BRIX, increased protein level, reduced protein level, increased level of a metabolite, increased level of photosynthetic pigments, increased lipid level, reduced lipid level, altered fatty acid saturation, increased level of saturated fat, reduced level of saturated fat, increased tocopherol level, reduced tocopherol level, increased prenyl lipid levels, increased nutritional content of tissues, increased processability, increased calorific value, reduced levels of chlorine, increased alkaloid level, reduced alkaloid level, increased wax level, reduced wax level, increased wax ester level, increased tannin level, increased taxol level, increased xanthophyll levels, increased bioplastic levels, increased level of a biopolymer, reduced levels or a biopolymer, altered starch composition, increased latex level, and increased rubber level;
   [0149] as compared to a reference or control plant of the same species that lacks the non-native allele;
   [0150] and the amino acid sequence identity is at least 30% or at least 35%, or at least 40%, or at least 45%, or at least 50%, or at least 55%, or at least 60%, 61%, 62%, 63%, 64%, 65%, 66%, 67%, 68%, 69%, 70%, 71%, 72%, 73%, 74%, 75%, 76%, 77%, 78%, 79%, 80%, 81%, 82%, 83%, 84%, 85%, 86%, 87%, 88%, 89%, 90%, 91%, 92%, 93%, 94%, 95%, 96%, 97%, 98%, or at least 99%, or about 100%.
[0151] 2L. The genetically modified crop, turf, weed, or ornamental plant of Statement 2K, wherein the uORF is targeted based on the final nucleotide of the uORF stop codon residing at a location between −1 and −1500 nucleotides upstream of the start codon of the polynucleotide that encodes the polypeptide with regulatory activity.
[0152] 2M. The genetically modified crop plant of Statement 2K, wherein introduction of the targeted genetic modification into the plant does not result in negative effects on plant yield, size, organ shape or vigor and produces the modified crop plant that shows an Improved Trait selected from the group consisting of: a yield increase, improved flavor, improved texture, altered circadian rhythm, accelerated flowering, accelerated senescence, delayed senescence, increased branching, reduced branching, increased apical dominance, reduced apical dominance, shade tolerance, increased root mass, increased root hair number, increased vegetative mass, increased fruit mass, improved fruit quality, increased germination rate, increased trichome length, reduced trichome length, reduced thorns, reduced spines, thornless, altered leaf shape, increased leaf number, reduced leaf number, altered leaf angle, altered leaf position, altered branch angle, increased peelability, reduced cellular adhesion, increased cellular adhesion, reduced peel thickness, reduced fruit skin thickness, increased fruit skin thickness, increased seed coat thickness, reduced seed coat thickness, seedless, reduced seed size, increased seed size, apomixis, increased embryogenesis, increased susceptibility to transgenic transformation, increased callus formation, increased embryo formation, increased root formation, increased cell division, reduced cell division, sterility, male sterility, inviable pollen, lack of stamens, lack of carpels, increased carpel number, increased petal number, reduced petal number increased trichome number, reduced trichome number, increased stem width, reduced stem width, increased internode length, reduced internode length, increased floral organ size, altered floral organ shape, reduced floral organ size, reduced fruit abscission, reduced pod shattering, altered organ abscission, variegation, increased hypocotyl length, reduced hypocotyl length, delayed flowering, elimination of flowering, sterility, improved osmotic stress tolerance, improved photosynthesis, improved nitrogen use efficiency, improved phosphorus use efficiency, improved potassium use efficiency, increased nutrient use efficiency, increased nutrient uptake, increased uptake of a metal ion, increased sequestration of a heavy metal, improved oxidative stress tolerance, increased pigment level, improved salt tolerance, improved cold tolerance, improved tolerance of freezing damage, improved freezing tolerance, improved dehydration stress, drought tolerance, improved recovery following drought, decreased wilting, increased plastid number, increased chlorophyll content, increased thylakoid density, increased photosynthetic capacity, increased respiration, reduced respiration, increased photorespiration, reduced photorespiration, increased transpiration, reduced transpiration, increased stomatal conductivity, reduced stomatal conductivity, increased carbon fixation, increased carbon sequestration, increased photosynthetic rate, increased carotenoid level, reduced carotenoid level, increased electron transport, improved non-photochemical quenching, increased ion transport, reduced ion transport, altered carbon to nitrogen balance, increased sensitivity to a hormone, reduced sensitivity to a hormone, reduced sensitivity to ethylene, increased auxin level, reduced auxin level, increased auxin transport, increased auxin sensitivity, reduced auxin sensitivity, increased gibberellin level, reduced gibberellin increased gibberellin sensitivity, reduced gibberellin sensitivity, increased abscisic acid level, reduced abscisic acid level, increased abscisic acid sensitivity, reduced abscisic acid sensitivity, increased cytokinin level, reduced cytokinin level, increased cytokinin level, reduced cytokinin level, increased cytokinin sensitivity, reduced cytokinin sensitivity, increased jasmonate level, reduced jasmonate level, increased jasmonate sensitivity, reduced jasmonate sensitivity, increased salicylic acid level, reduced salicylic acid level, reduced salicylic acid sensitivity, increased salicylic acid sensitivity, increased strigolactone level, reduced strigolactone level, increased sensitivity to strigolactone, reduced sensitivity to strigolactone, reduced sensitivity to ethylene, increased sensitivity to ethylene, accelerated ripening, delayed ripening, reduced fruit spoilage, increased shelf life, improved heat stress, improved tolerance to low nitrogen conditions, increased seedling vigor, increased disease resistance, increased resistance to a fungal pathogen, increased resistance to bacterial pathogen, increased resistance to a viral pathogen, increased resistance to Botrytis; increased resistance to Erysiphe; increased resistance to Fusarium; increased resistance to Sclerotinia; increased rust resistance, increased resistance to Phytophthora, increased resistance to black sigatoka, increased resistance to Xanthomonas, increased resistance to a necrotrophic fungus, increased resistance to a biotrophic fungus, increase nematode resistance, increased insect resistance, herbivore resistance, increased mollusk resistance, increased protein levels, increased oil levels, reduced lignin level, increased THC level, increased CBD level, increased anthocyanin level, reduced anthocyanin level, increased nutrient level in tissue, increased vitamin level in tissue, increased carbohydrate level, reduced level of a carbohydrate, increased starch level, increased sugar level, increased BRIX, increased protein level, reduced protein level, increased level of a metabolite, increased level of photosynthetic pigments, increased lipid level, reduced lipid level, altered fatty acid saturation, increased level of saturated fat, reduced level of saturated fat, increased tocopherol level, reduced tocopherol level, increased prenyl lipid levels, increased nutritional content of tissues, increased processability, increased calorific value, reduced levels of chlorine, increased alkaloid level, reduced alkaloid level, increased wax level, reduced wax level, increased wax ester level, increased tannin level, increased taxol level, increased xanthophyll levels, increased bioplastic levels, increased level of a biopolymer, reduced levels or a biopolymer, altered starch composition, increased latex level, and increased rubber level;
   [0153] when the genetically modified plant is grown under glasshouse or field conditions, as compared to the control or reference plant.
[0154] 2N. The genetically modified plant of Statement 2K, wherein the non-native allele is selected and/or produced by a method selected from the group consisting of:
   [0155] DNA marker assisted breeding;
   [0156] deletion, insertion and/or substitution of one or more nucleotides;
   [0157] site-specific mutagenesis;
   [0158] chemical mutagenesis;
   [0159] targeting induced local lesions in genomes (TILLING); and
   [0160] a gene editing technique;
   [0161] wherein the gene editing technique includes a transcription activator-like effector nuclease (TALEN) or zinc finger nuclease (ZFN) based method, or a gene editing using a CRISPR-Cas endonuclease technique that uses a nuclease selected from Cas nuclease, Cas9 nuclease, CasX nuclease, CasY nuclease, a Cpf1 nuclease, a C2c1 nuclease, a C2c2 nuclease (Cas13a nuclease), or a C2c3 nuclease, NgAgo nuclease, or a gene editing technique that uses base editing deaminases, engineered site-specific meganucleases, an Argonaute related protein, or a CreI related endonuclease
[0162] 2O. The genetically modified plant of Statement 2K, wherein the uORF comprises any of SEQ ID NO: 5156-5227.
[0163] 2P. A method of producing an Improved Trait selected from the group consisting of:
   [0164] a yield increase, improved flavor, improved texture, altered circadian rhythm, accelerated flowering, accelerated senescence, delayed senescence, increased branching, reduced branching, increased apical dominance, reduced apical dominance, shade tolerance, increased root mass, increased root hair number, increased vegetative mass, increased fruit mass, improved fruit quality, increased germination rate, increased trichome length, reduced trichome length, reduced thorns, reduced spines, thornless, altered leaf shape, increased leaf number, reduced leaf number, altered leaf angle, altered leaf position, altered branch angle, increased peelability, reduced cellular adhesion, increased cellular adhesion, reduced peel thickness, reduced fruit skin thickness, increased fruit skin thickness, increased seed coat thickness, reduced seed coat thickness, seedless, reduced seed size, increased seed size, apomixis, increased embryogenesis, increased susceptibility to transgenic transformation, increased callus formation, increased embryo formation, increased root formation, increased cell division, reduced cell division, sterility, male sterility, inviable pollen, lack of stamens, lack of carpels, increased carpel number, increased petal number, reduced petal number increased trichome number, reduced trichome number, increased stem width, reduced stem width, increased internode length, reduced internode length, increased floral organ size, altered floral organ shape, reduced floral organ size, reduced fruit abscission, reduced pod shattering, altered organ abscission, variegation, increased hypocotyl length, reduced hypocotyl length, delayed flowering, elimination of flowering, sterility, improved osmotic stress tolerance, improved photosynthesis, improved nitrogen use efficiency, improved phosphorus use efficiency, improved potassium use efficiency, increased nutrient use efficiency, increased nutrient uptake, increased uptake of a metal ion, increased sequestration of a heavy metal, improved oxidative stress tolerance, increased pigment level, improved salt tolerance, improved cold tolerance, improved tolerance of freezing damage, improved freezing tolerance, improved dehydration stress, drought tolerance, improved recovery following drought, decreased wilting, increased plastid number, increased chlorophyll content, increased thylakoid density, increased photosynthetic capacity, increased respiration, reduced respiration, increased photorespiration, reduced photorespiration, increased transpiration, reduced transpiration, increased stomatal conductivity, reduced stomatal conductivity, increased carbon fixation, increased carbon sequestration, increased photosynthetic rate, increased carotenoid level, reduced carotenoid level, increased electron transport, improved non-photochemical quenching, increased ion transport, reduced ion transport, altered carbon to nitrogen balance, increased sensitivity to a hormone, reduced sensitivity to a hormone, reduced sensitivity to ethylene, increased auxin level, reduced auxin level, increased auxin transport, increased auxin sensitivity, reduced auxin sensitivity, increased gibberellin level, reduced gibberellin increased gibberellin sensitivity, reduced gibberellin sensitivity, increased abscisic acid level, reduced abscisic acid level, increased abscisic acid sensitivity, reduced abscisic acid sensitivity, increased cytokinin level, reduced cytokinin level, increased cytokinin level, reduced cytokinin level, increased cytokinin sensitivity, reduced cytokinin sensitivity, increased jasmonate level, reduced jasmonate level, increased jasmonate sensitivity, reduced jasmonate sensitivity, increased salicylic acid level, reduced salicylic acid level, reduced salicylic acid sensitivity, increased salicylic acid sensitivity, increased strigolactone level, reduced strigolactone level, increased sensitivity to strigolactone, reduced sensitivity to strigolactone, reduced sensitivity to ethylene, increased sensitivity to ethylene, accelerated ripening, delayed ripening, reduced fruit spoilage, increased shelf life, improved heat stress, improved tolerance to low nitrogen conditions, increased seedling vigor, increased disease resistance, increased resistance to a fungal pathogen, increased resistance to bacterial pathogen, increased resistance to a viral pathogen, increased resistance to Botrytis; increased resistance to Erysiphe; increased resistance to Fusarium; increased resistance to Sclerotinia; increased rust resistance, increased resistance to Phytophthora, increased resistance to black sigatoka, increased resistance to Xanthomonas, increased resistance to a necrotrophic fungus, increased resistance to a biotrophic fungus, increase nematode resistance, increased insect resistance, herbivore resistance, increased mollusk resistance, increased protein levels, increased oil levels, reduced lignin level, increased THC level, increased CBD level, increased anthocyanin level, reduced anthocyanin level, increased nutrient level in tissue, increased vitamin level in tissue, increased carbohydrate level, reduced level of a carbohydrate, increased starch level, increased sugar level, increased BRIX, increased protein level, reduced protein level, increased level of a metabolite, increased level of photosynthetic pigments, increased lipid level, reduced lipid level, altered fatty acid saturation, increased level of saturated fat, reduced level of saturated fat, increased tocopherol level, reduced tocopherol level, increased prenyl lipid levels, increased nutritional content of tissues, increased processability, increased calorific value, reduced levels of chlorine, increased alkaloid level, reduced alkaloid level, increased wax level, reduced wax level, increased wax ester level, increased tannin level, increased taxol level, increased xanthophyll levels, increased bioplastic levels, increased level of a biopolymer, reduced levels or a biopolymer, altered starch composition, increased latex level, and increased rubber level in a crop plant comprising introducing a targeted genetic modification into the genome of said crop plant which creates a non-native allele of a gene which further comprises a mutation in a uORF that is operably linked to a polynucleotide that encodes a polypeptide with cellular regulatory activity that has an amino acid sequence with a percentage identity to a polypeptide selected from the group consisting of SEQ ID NO: 3999-5227;
   [0165] selecting a plant of the crop plant and wherein the selected plant contains the non-native allele and exhibits the Improved Trait compared to a reference or control plant of the same species that lacks the non-native allele;
   [0166] wherein the targeted genetic modification modulates the expression level and/or activity of the encoded polypeptide with transcriptional regulatory activity; and
   [0167] the percentage identity is at least 30% or at least 35%, or at least 40%, or at least 45%, or at least 50%, or at least 55%, or at least 60%, 61%, 62%, 63%, 64%, 65%, 66%, 67%, 68%, 69%, 70%, 71%, 72%, 73%, 74%, 75%, 76%, 77%, 78%, 79%, 80%, 81%, 82%, 83%, 84%, 85%, 86%, 87%, 88%, 89%, 90%, 91%, 92%, 93%, 94%, 95%, 96%, 97%, 98%, or at least 99%, or about 100%.
[0168] 2Q. The genetically modified crop plant of Statement 2P, wherein the non-native allele is selected and/or produced
[0169] by a method selected from the group consisting of:
   [0170] DNA marker assisted breeding;
   [0171] deletion, insertion and/or substitution of one or more nucleotides;
   [0172] site-specific mutagenesis;
   [0173] chemical mutagenesis;
   [0174] targeting induced local lesions in genomes (TILLING); and
   [0175] a gene editing technique;
   [0176] wherein the gene editing technique includes a transcription activator-like effector nuclease (TALEN) or zinc finger nuclease (ZFN) based method, or a gene editing using a CRISPR-Cas endonuclease technique that uses a nuclease selected from Cas nuclease, Cas9 nuclease, CasX nuclease, CasY nuclease, a Cpf1 nuclease, a C2c1 nuclease, a C2c2 nuclease (Cas13a nuclease), or a C2c3 nuclease, NgAgo nuclease, or a gene editing technique that uses base editing deaminases, engineered site-specific meganucleases, an Argonaute related protein, or a CreI related endonuclease.
[0177] 2R. The genetically modified crop plant of Statement 2P, wherein the introduction of the targeted genetic modification into the plant does not result in negative effects on plant size, organ shape or vigor and produces a modified plant that shows an Improved Trait selected from the group consisting of:
   [0178] a yield increase, improved flavor, improved texture, altered circadian rhythm, accelerated flowering, accelerated senescence, delayed senescence, increased branching, reduced branching, increased apical dominance, reduced apical dominance, shade tolerance, increased root mass, increased root hair number, increased vegetative mass, increased fruit mass, improved fruit quality, increased germination rate, increased trichome length, reduced trichome length, reduced thorns, reduced spines, thornless, altered leaf shape, increased leaf number, reduced leaf number, altered leaf angle, altered leaf position, altered branch angle, increased peelability, reduced cellular adhesion, increased cellular adhesion, reduced peel thickness, reduced fruit skin thickness, increased fruit skin thickness, increased seed coat thickness, reduced seed coat thickness, seedless, reduced seed size, increased seed size, apomixis, increased embryogenesis, increased susceptibility to transgenic transformation, increased callus formation, increased embryo formation, increased root formation, increased cell division, reduced cell division, sterility, male sterility, inviable pollen, lack of stamens, lack of carpels, increased carpel number, increased petal number, reduced petal number increased trichome number, reduced trichome number, increased stem width, reduced stem width, increased internode length, reduced internode length, increased floral organ size, altered floral organ shape, reduced floral organ size, reduced fruit abscission, reduced pod shattering, altered organ abscission, variegation, increased hypocotyl length, reduced hypocotyl length, delayed flowering, elimination of flowering, sterility, improved osmotic stress tolerance, improved photosynthesis, improved nitrogen use efficiency, improved phosphorus use efficiency, improved potassium use efficiency, increased nutrient use efficiency, increased nutrient uptake, increased uptake of a metal ion, increased sequestration of a heavy metal, improved oxidative stress tolerance, increased pigment level, improved salt tolerance, improved cold tolerance, improved tolerance of freezing damage, improved freezing tolerance, improved dehydration stress, drought tolerance, improved recovery following drought, decreased wilting, increased plastid number, increased chlorophyll content, increased thylakoid density, increased photosynthetic capacity, increased respiration, reduced respiration, increased photorespiration, reduced photorespiration, increased transpiration, reduced transpiration, increased stomatal conductivity, reduced stomatal conductivity, increased carbon fixation, increased carbon sequestration, increased photosynthetic rate, increased carotenoid level, reduced carotenoid level, increased electron transport, improved non-photochemical quenching, increased ion transport, reduced ion transport, altered carbon to nitrogen balance, increased sensitivity to a hormone, reduced sensitivity to a hormone, reduced sensitivity to ethylene, increased auxin level, reduced auxin level, increased auxin transport, increased auxin sensitivity, reduced auxin sensitivity, increased gibberellin level, reduced gibberellin increased gibberellin sensitivity, reduced gibberellin sensitivity, increased abscisic acid level, reduced abscisic acid level, increased abscisic acid sensitivity, reduced abscisic acid sensitivity, increased cytokinin level, reduced cytokinin level, increased cytokinin level, reduced cytokinin level, increased cytokinin sensitivity, reduced cytokinin sensitivity, increased jasmonate level, reduced jasmonate level, increased jasmonate sensitivity, reduced jasmonate sensitivity, increased salicylic acid level, reduced salicylic acid level, reduced salicylic acid sensitivity, increased salicylic acid sensitivity, increased strigolactone level, reduced strigolactone level, increased sensitivity to strigolactone, reduced sensitivity to strigolactone, reduced sensitivity to ethylene, increased sensitivity to ethylene, accelerated ripening, delayed ripening, reduced fruit spoilage, increased shelf life, improved heat stress, improved tolerance to low nitrogen conditions, increased seedling vigor, increased disease resistance, increased resistance to a fungal pathogen, increased resistance to bacterial pathogen, increased resistance to a viral pathogen, increased resistance to Botrytis; increased resistance to Erysiphe; increased resistance to Fusarium; increased resistance to Sclerotinia; increased rust resistance, increased resistance to Phytophthora, increased resistance to black sigatoka, increased resistance to Xanthomonas, increased resistance to a necrotrophic fungus, increased resistance to a biotrophic fungus, increase nematode resistance, increased insect resistance, herbivore resistance, increased mollusk resistance, increased protein levels, increased oil levels, reduced lignin level, increased THC level, increased CBD level, increased anthocyanin level, reduced anthocyanin level, increased nutrient level in tissue, increased vitamin level in tissue, increased carbohydrate level, reduced level of a carbohydrate, increased starch level, increased sugar level, increased BRIX, increased protein level, reduced protein level, increased level of a metabolite, increased level of photosynthetic pigments, increased lipid level, reduced lipid level, altered fatty acid saturation, increased level of saturated fat, reduced level of saturated fat, increased tocopherol level, reduced tocopherol level, increased prenyl lipid levels, increased nutritional content of tissues, increased processability, increased calorific value, reduced levels of chlorine, increased alkaloid level, reduced alkaloid level, increased wax level, reduced wax level, increased wax ester level, increased tannin level, increased taxol level, increased xanthophyll levels, increased bioplastic levels, increased level of a biopolymer, reduced levels or a biopolymer, altered starch composition, increased latex level, and increased rubber level;
   [0179] when the modified plant is grown under glasshouse or field conditions, as compared to a control or reference plant that does not harbor the targeted genetic modification.
[0180] 2S. The method of Statement 2P, wherein the location of the uORF is first identified by executing a computational algorithm that is applied to ribosome profiling data whereby the algorithm identifies the presence of the uORF in the polynucleotide that encodes the polypeptide, or in a polynucleotide that encodes a homolog with sequence similarity to the polypeptide, based on the existence of ribosome enrichment in the interval from one stop codon to the next stop codon within the same open reading frame.
[0181] 2T. A process of killing the cells of plant, comprising contacting parts of said plant with a preparation of nanoparticles, or a suspension containing cells of an Agrobacterium strain, containing a nucleic acid construct comprising a gene editing system which expresses in the cells of said plant a guide RNA which introduces a mutation in a uORF that is upstream of a main ORF in the genome of said plant wherein said main ORF encodes a necrosis-inducing polypeptide that triggers death of the cells of the plant.
[0182] 2U. The method of Statement 2T, wherein the plant is a weed.
[0183] 2V. The method of Statement 2U, wherein the weed is selected from the list: Arabidopsis, Tall Waterhemp (Amaranthus tuberculatus), Johnson grass (Sorghum halepense), wild oat (Avena fatua), velvetleaf (Abutilon theophrasti), pigweed (Amaranthus palmeri), redroot pigweed (Amaranthus retroflexus) Poison Sumac (Toxicodendron Vernix), Japanese Knot Weed (Polygonum cuspidatum), Crabgrass (Digitaria), Dandelion (Leontodon taraxacum), Plantain (Plantago major), Common Ragweed (Ambrosia artemisiifolia), Giant Ragweed (Ambrosia trifida), Hedge Bindweed (Convolvus arvensis), Ground Ivy (Glechoma hederaceae), Purslane (Portulaca olearacea), Stinging Nettle (Urtica dioica), Curly Dock (Rumex crispus), Wild Madder (Galium mollugo), Clover Leaf (Trifolium species)
[0184] 2W. The method of Statement 2T, wherein the gene editing system is a CRISPR-CAS system
[0185] 2X. The method of Statement 2T, wherein the nucleic acid construct comprises a DNA sequence that encodes a CAS enzyme.
[0186] 2Y. The method of Statement 2T wherein the main ORF encodes a polypeptide that comprises SEQ ID NO: 5152, 5153, 5154 or 5155 (AT4G36900, AT2G23340, AT5G67190, or AT3G50260) or a homolog with sequence similarity to SEQ ID NO: 5152, 5153, 5154 or 5155.
[0187] 2Z. The method of Statement 2T, wherein the main ORF encodes a polypeptide that has at least 30% or at least 35%, or at least 40%, or at least 45%, or at least 50%, or at least 55%, or at least 60%, 61%, 62%, 63%, 64%, 65%, 66%, 67%, 68%, 69%, 70%, 71%, 72%, 73%, 74%, 75%, 76%, 77%, 78%, 79%, 80%, 81%, 82%, 83%, 84%, 85%, 86%, 87%, 88%, 89%, 90%, 91%, 92%, 93%, 94%, 95%, 96%, 97%, 98%, or at least 99%, or about 100% identity to any of SEQ ID NO: 5152, 5153, 5154 or 5155 (AT4G36900, AT2G23340, AT5G67190, or AT3G50260).
[0188] 2AA. The method of Statement 2T, wherein the uORF comprises any of SEQ ID NO: 5211-5227 inclusive.
[0189] 2AB. An herbicidal composition comprising a preparation of nanoparticles, or a suspension containing cells of an Agrobacterium strain, containing a nucleic acid construct comprising a gene editing system which expresses in the cells of a target weed a guide RNA which introduces a mutation in a uORF that is upstream of a main ORF in the genome of said weed wherein said main ORF encodes a necrosis inducing polypeptide that triggers death of the cells of the plant.
[0190] 2AC. The composition of Statement 2AB, wherein the gene editing system is a CRISPR-CAS system
[0191] 2AD. The composition of Statement 2AB, wherein the nucleic acid construct comprises a DNA sequence that encodes a CAS enzyme.
[0192] 2AE. The composition of Statement 2AB, wherein the main ORF encodes a polypeptide that comprises SEQ ID NO: 5152, 5153, 5154 or 5155 (AT4G36900, AT2G23340, AT5G67190, or AT3G50260) or a homolog of SEQ ID NO: 5152, 5153, 5154 or 5155.
[0193] 2AF. The composition of Statement 2AB, wherein the main ORF encodes a polypeptide that has 30% or at least 35%, or at least 40%, or at least 45%, or at least 50%, or at least 55%, or at least 60%, 61%, 62%, 63%, 64%, 65%, 66%, 67%, 68%, 69%, 70%, 71%, 72%, 73%, 74%, 75%, 76%, 77%, 78%, 79%, 80%, 81%, 82%, 83%, 84%, 85%, 86%, 87%, 88%, 89%, 90%, 91%, 92%, 93%, 94%, 95%, 96%, 97%, 98%, or at least 99%, or about 100% identity to any of SEQ ID NO: 5152, 5153, 5154 or 5155 (AT4G36900, AT2G23340, AT5G67190, or AT3G50260).
[0194] 2AG. The composition of Statement 2AB, wherein the uORF comprises any of SEQ ID NO: 5211-5227 inclusive.

### Example 3

Genetic Modification of Microorganisms and the Use of uORF Mutations to Boost Production of Target Molecules and/or Enzymes in Cells Cultured Through Fermentation.
[0195] 3A. A genetically modified cell comprising a non-naturally occurring polynucleotide that has been produced by gene editing, wherein the non-naturally occurring polynucleotide encodes a polypeptide that results in the production of an increased level of a target molecule or enzyme as compared to a control microorganism that does not comprise the non-naturally polynucleotide, and wherein non-naturally occurring polynucleotide contains a mutation in a uORF that resides in the same transcript as a main ORF that encodes the polypeptide.
[0196] 3B. The genetically modified cell of Statement 3A, wherein the uORF is first identified through application of an algorithm to ribosome profiling data whereby the algorithm identifies the presence of the uORF in the polynucleotide that encodes the polypeptide, or in a polynucleotide that encodes a homolog of the polypeptide, based on the existence of ribosome enrichment in the interval from one stop codon to the next stop codon within the same open reading frame;
   [0197] wherein the homolog is at least 30% or at least 35%, or at least 40%, or at least 45%, or at least 50%, or at least 55%, or at least 60%, 61%, 62%, 63%, 64%, 65%, 66%, 67%, 68%, 69%, 70%, 71%, 72%, 73%, 74%, 75%, 76%, 77%, 78%, 79%, 80%, 81%, 82%, 83%, 84%, 85%, 86%, 87%, 88%, 89%, 90%, 91%, 92%, 93%, 94%, 95%, 96%, 97%, 98%, or at least 99%, or about 100% to the polypeptide.
[0198] 3B. The genetically modified cell of Statement 3A wherein the target molecule or enzyme is used for an application selected from the following: degradation of a pollutant, plastic degradation, oil degradation, use in laundry detergent; use as scent, use as flavoring, use as a pigment, use as a material, food processing, wood processing, antibiosis, treatment of cancer, treatment of diabetes, treatment of heart disease, treatment of hypertension, treatment of obesity, treatment of arthritis, treatment of degenerative disease, use as a psychoactive substance, treatment of anxiety, treatment of a behavioral disorder, use as a food supplement, use as a digestive aid, use as an herbicide, use as an insecticide, use as a fungicide, use as a rodenticide, use as a bactericide, use as a nematicide, use as an algicide or use as an anti-viral agent.
[0199] 3D. The genetically modified cell of Statement 3A wherein the target molecule or enzyme is produced in a fermentation process.
[0200] 3F. The genetically modified cell of Statement 3A wherein the cell is a fungal cell, a bacterial cell, a mammalian cell, or a plant cell.
[0201] 3G. The genetically modified cell of statement 3A wherein the molecule is encoded by a biosynthetic gene cluster (BGC) and wherein the uORF reside in the 5′ region of a transcript (mRNA) that encodes for a transcriptional regulator protein that regulates expression of genes in the biosynthetic gene cluster.

### Example 4

### Control of Cancerous Cells

Typically, the practitioner commences by selecting a published ribosome profiling dataset, or experimentally generating a new ribosome profiling dataset by performing ribosome “pull-downs” on mRNA samples purified from cancerous tissue or a cancer cell line. RNASeq is performed whereby the pulled down RNA is reverse transcribed and subjected to deep sequencing (e.g., 50× coverage using the Illumina system). An algorithm of the type detailed herein is the run on the sequence data to identify uORFs in stop-stop intervals. A gene that contains a uORF, and where the main ORF of which gene encodes a cell death promoting protein or cell cycle inhibitor, is then selected for the process of killing the cancer cells.

[0202] In a more specific embodiment of the invention, a tumor or cancer cell line is subject to ribosome profiling and the data are analyzed by application of the algorithm detailed herein to identify loci that are subject to uORF regulation. A locus is selected that has a uORF and an operably linked main ORF that encodes a polypeptide that has a function in tumor suppression, cell death, or inhibition of cell division. A gene editing construct that encodes a guide RNA with identity to a uORF at the selected locus, which has is designed to knock-out or mutate the uORF. The gene editing construct is then delivered to a tumor or cancer cells in vivo by means of a delivery system such as viral vector. The disruption of the uORF in the cancer cells or cells of the tumor results in increased translation of the main ORF which leads to control of the tumor or cancer cells.

[0203] A practitioner may apply the methods herein to identify oncogenes that are uORF controlled by comparing ribosome pull down data from a cancerous tissue or cell line compared to ribosome pull down data from a control tissue. Typically, the practitioner commences by selecting a published ribosome profiling dataset from a cancer cell line, or experimentally generating a new ribosome profiling dataset by performing ribosome “pull-downs” on mRNA samples purified from cancerous tissue or cells, along with samples from control non-cancerous cells. RNASeq is performed whereby the pulled down RNA is reverse transcribed and subjected to deep sequencing (e.g. 50× coverage using the Illumina system). An algorithm of the type detailed herein is the run on the sequence data to identify uORFs. A gene that contains an identified upstream uORF in the control sample, where the uORF contains a mutation in the sample from the cancerous tissue may be considered a candidate oncogene. Additional support that an identified gene is a likely oncogene may be obtained by performing a BLAST of the product of the main ORF against public databases; if the main ORF product shows homology to known cell cycle regulators, it is a strong candidate oncogene that may be contributing to cancerous nature of the cells in which it is active. Conversely, if a novel uORF is apparent upstream of a main ORF in the cancerous sample, and appears to have been generated by mutation, by comparison to the control sample, the created uORF may be suppressing an anti-cancer gene.
[0204] 4A. A process of controlling cancerous cells or cells of a tumor, comprising contacting the cancerous cells or cells of the tumor with a delivery vector containing a nucleic acid construct comprising a gene editing system which expresses in the cells a guide RNA which introduces a mutation in a uORF that is upstream of a main ORF in the genome of said cells wherein said main ORF encodes polypeptide that triggers death or inhibits cell division of the cancerous cells or cells of the tumor.
[0205] 4B. The process of Statement 4A, wherein the uORF is first identified through application of an algorithm to ribosome profiling data whereby the algorithm identifies the presence of the uORF in the main ORF that encodes the polypeptide or in a main ORF that encodes a homolog of the polypeptide based on the existence of ribosome enrichment in the interval from one stop codon to the next stop codon within the same open reading frame.
[0206] 4B. The process of Statement 4A wherein the main ORF comprises a cancer suppressor gene.
[0207] 4D. The process of Statement 4A wherein the main ORF encodes a polypeptide that inhibits cell division.
[0208] 4E. The process of Statement 4A wherein the delivery vector is a viral vector.
[0209] 4F. As discussed herein, there are instances where a uORF residing upstream of a main ORF encodes a short peptide or uPEP which acts to inhibit, either directly or indirectly, the activity of the main ORF. In instances where the uORF is upstream of a main ORF that promotes cell division, or is acting through some other mechanism to promote a cancerous state, the uPEP may be formulated and delivered as a drug (e.g., orally or intravenously) to inhibit the activity of the cancer causing gene and thereby control the cancerous cells.
   In such instances, the uPEP may be synthesized either through fermentation (e.g., in yeast or E. coli) or synthesized artificially, formulated (e.g., to promote stabilization and/or cellular entry) and delivered to a patient either orally or intravenously to control the cancer.

### Example 5

### Control of Eukaryotic Pests and Pathogens

The examples below have the advantage of using an exogenously applied nucleic acid that is specific to a target pest or pathogen, which is superior to use of chemical agent, which often act non-specifically in a broadly toxic maimer and have detrimental effects on non-target organisms.
Typically, the practitioner commences by selecting a published ribosome profiling dataset, or experimentally generating a new ribosome profiling dataset by performing ribosome “pull-downs” on mRNA samples purified from tissue or cells of the target pathogen. RNASeq is performed whereby the pulled down RNA is reverse transcribed and subjected to deep sequencing (e.g., 50× coverage using the Illumina system). An algorithm of the type detailed herein is the run on the sequence data to identify uORFs. A gene that contains a uORF, and where the main ORF of which gene encodes a cell death promoting protein or cell cycle inhibitor, is then selected for the process of controlling the pest or pathogen.
[0210] 5A. A process of controlling a eukaryotic pest or pathogen, comprising contacting cells of the eukaryotic pest or pathogen with a delivery vector containing a nucleic acid construct comprising a gene editing system which expresses in the cells a guide RNA which introduces a mutation in a uORF that is upstream of a main ORF in the genome of said cells wherein said main ORF encodes polypeptide that triggers death or inhibits cell division of the cells of the eukaryotic pathogen.
[0211] 5B. The process of Statement 5A, wherein the uORF is first identified through application of an algorithm to ribosome profiling data whereby the algorithm identifies the presence of the uORF in the main ORF that encodes the polypeptide or in a main ORF that encodes a gene with sequence similarity of the polypeptide based on the existence of ribosome enrichment in the interval from one stop codon to the next stop codon within the same open reading frame;
   [0212] wherein the gene with sequence similarity is at least 30% or at least 35%, or at least 40%, or at least 45%, or at least 50%, or at least 55%, or at least 60%, 61%, 62%, 63%, 64%, 65%, 66%, 67%, 68%, 69%, 70%, 71%, 72%, 73%, 74%, 75%, 76%, 77%, 78%, 79%, 80%, 81%, 82%, 83%, 84%, 85%, 86%, 87%, 88%, 89%, 90%, 91%, 92%, 93%, 94%, 95%, 96%, 97%, 98%, or at least 99%, or about 100% identical to the polypeptide.
[0213] 5C. The process of Statement 5A, wherein the main ORF encodes a polypeptide that inhibits cell division.
[0214] 5D. The process of Statement 5A, wherein the delivery vector is a viral vector or an antibody.
[0215] 5E. The process of Statement 5A, wherein the pathogen is a fungus.
[0216] 5F. The process of Statement 5A, wherein the pathogen is a protozoan.
[0217] 5G. The process of Statement 5A, wherein the pathogen is a malarial cell.
[0218] 5H. The process of Statement 5A, wherein the pathogen is a parasitic worm.
[0219] 5I. In instances where an essential gene (aka “lethal” gene) from a pest or pathogen is essential for the pest or pathogen to develop or complete its lifecycle and the essential gene possesses a uORF in its transcript, upstream of the main ORF, the uPEP encoded by the uORF may provide an effective agent for control of the pest or pathogen by its exogenous application as a pesticide. Ideally, an essential gene will be selected which is specific to the particular type of pest and which is either not present or is non-essential in mammals. An example would be genes involved in chitin biosynthesis for example, if a practitioner is seeking to control a fungus or an insect. In the case of an herbicide, a uORF is sought in a plant specific essential gene, such as a critical gene involved in amino acid synthesis, plant hormone production, meristem development, or photosynthesis.
   In the above instances, the practitioner uses the uORF sequence to heterologously produce the encoded uPEP in a fermentation system (e.g., E. coli, yeast, or a cell line) and the resulting peptide is formulated to stabilize it and/or promote cellular entry and is then exogenously applied to the pest as a pesticidal agent.

### Example 6

Identifying uORFs in Heterologous Genes
Sequence similarity between mORFs of different species can be used to identify uORFs in heterologous genes. AT1G01060.1 (SEQ ID NO: 4000; LHY) encodes a MYB-related putative transcription factor involved in circadian rhythm and was identified as a new uORF-containing gene candidate. The protein sequence of LHY from Arabidopsis was used to identify the LHY orthologs in Brassica oleraceae. The AT1G01060.1 sequence was then used in a sequence homology alignment search of the genome Brassica oleracea using BLAST (tblastn) at genomevolution.org/coge/CoGeBlast.pl as well as in a range of other species Results are shown in Table 2.

TABLE 3
Putative orthologs of LHY/CCA1 from sugar beet (Beta vulgaris), Eucalyptus (Eucalyptus grandis),
barrel medic (Medicago truncatula), brassica spp. (Brassica oleracea), and orthologs
of A5-DREB from pigweed (Amaranthus hybridus) through BLAST analysis

| | Chr | Position | HSP# | E-value | Quality | Closest Genomic Feature |
|---|---|---|---|---|---|---|
| Beta vulgaris (Adrew Funk | 1_EL10.1 | 2029057 | 1 | 2.00E−38 | 21.80% | E10Ac1g00171.1:8 |
| FASTA vEL10_1.0) | | | | | | |
| Beta vulgaris (Adrew Funk | 4_EL10.1 | 36341401 | 2 | 2.00E−19 | 7.40% | none |
| FASTA vEL10_1.0) | | | | | | |
| Beta vulgaris (Adrew Funk | 1_EL10.1 | 2027891 | 3 | 2.00E−38 | 9.30% | E10Ac1g00170.1:13 |
| FASTA vEL10_1.0) | | | | | | |
| Beta vulgaris (Adrew Funk | 1_EL10.1 | 2040547 | 4 | 7.00E−15 | 5.30% | E10Ac1g00171.1:4 |
| FASTA vEL10_1.0) | | | | | | |
| Beta vulgaris (Adrew Funk | 7_EL10.1 | 29147606 | 5 | 1.00E−06 | 4.00% | none |
| FASTA vEL10_1.0) | | | | | | |
| Eucalyptus grandis BRASUZ1 | 4 | 40431588 | 1 | 7.00E−47 | 0.329 | Eucgr.D02651.2.v2.0 |
| Eucalyptus grandis BRASUZ1 | 6 | 41227391 | 2 | 5.00E−19 | 0.048 | Eucgr.F02906.1.v2.0 |
| Eucalyptus grandis BRASUZ1 | 4 | 40426987 | 3 | 1.00E−12 | 0.053 | Eucgr.D02651.1.v2.0 |
| Eucalyptus grandis BRASUZ1 | 11 | 30919289 | 4 | 7.00E−19 | 0.043 | Eucgr.K02302.1.v2.0 |
| Eucalyptus grandis BRASUZ1 | 1 | 42597650 | 5 | 0.000004 | 0.037 | Eucgr.A02733.1.v2.0 |
| Eucalyptus grandis BRASUZ1 | 11 | 30919483 | 6 | 7.00E−19 | 0.031 | Eucgr.K02302.1.v2.0 |
| Eucalyptus grandis BRASUZ1 | 6 | 41227587 | 7 | 5.00E−19 | 0.029 | Eucgr.F02906.1.v2.0 |
| Eucalyptus grandis BRASUZ1 | 4 | 40426881 | 8 | 1.00E−12 | 0.012 | Eucgr.D02651.1.v2.0 |
| Medicago truncatula (barrel | 7 | 49122314 | 1 | 2.00E−42 | 32.60% | Medtr7g118330.1.JCVIMt4.0v1 |
| medic) | | | | | | |
| Medicago truncatula (barrel | 6 | 28640709 | 2 | 3.00E−18 | 7.00% | Medtr6g477860.2.JCVIMt4.0v1 |
| medic) | | | | | | |
| Medicago truncatula (barrel | 7 | 49115772 | 3 | 2.00E−21 | 5.40% | Medtr7g118330.1.JCVIMt4.0v1 |
| medic) | | | | | | |
| Medicago truncatula (barrel | 5 | 32830655 | 4 | 1.00E−12 | 4.50% | Medtr5g076960.2.JCVIMt4.0v1 |
| medic) | | | | | | |
| Medicago truncatula (barrel | 3 | 29065130 | 5 | 1.00E−18 | 4.80% | Medtr3g064500.1.JCVIMt4.0v1 |
| medic) | | | | | | |
| Medicago truncatula (barrel | 7 | 49115962 | 6 | 2.00E−21 | 3.10% | Medtr7g118330.1.JCVIMt4.0v1 |
| medic) | | | | | | |
| Medicago truncatula (barrel | 3 | 29065360 | 7 | 1.00E−18 | 2.80% | Medtr3g064500.1.JCVIMt4.0v1 |
| medic) | | | | | | |
| Brassica oleracea (Ensembl | C5 | 409337 | 1 | 2.00E−126 | 40.30% | CDS:Bo5g002760.1 |
| Plants Masked by source v2.1) | | | | | | |
| Brassica oleracea (Ensembl | C5 | 410562 | 3 | 2.00E−126 | 14.70% | CDS:Bo5g002760.1 |
| Plants Masked by source v2.1) | | | | | | |
| Brassica oleracea (Ensembl | C3 | 37760 | 4 | 5.00E−71 | 26.00% | CDS:Bo3g001090.1 |
| Plants Masked by source v2.1) | | | | | | |
| Brassica oleracea (Ensembl | C3 | 38526 | 6 | 5.00E−71 | 13.30% | CDS:Bo3g001090.1 |
| Plants Masked by source v2.1) | | | | | | |
| Brassica oleracea (Ensembl | C3 | 4200012 | 8 | 2.00E−21 | 6.70% | CDS:Bo3g012470.1 |
| Plants Masked by source v2.1) | | | | | | |
| Amaranthus hybridus subsp. | tig00000569_arrow | 426296 | 1 | 3.00E−37 | 39.80% | Ah.00g189710.m01-v1.0.a1 |
| Hybridus | | | | | | |
| Amaranthus hybridus subsp. | tig00000007_arrow | 3229227 | 2 | 2.00E−35 | 38.70% | Ah.00g024560.m01-v1.0.a1 |
| Hybridus | | | | | | |
| Amaranthus hybridus subsp. | tig00068853_arrow | 5143989 | 3 | 1.00E−20 | 23.00% | Ah.00g217670.m01-v1.0.a1 |
| Hybridus | | | | | | |
| Amaranthus hybridus subsp. | tig00000084_arrow | 2199749 | 4 | 1.00E−19 | 20.90% | Ah.00g105020.m01-v1.0.a1 |
| Hybridus | | | | | | |
| Amaranthus hybridus subsp. | tig00000048_arrow | 3920876 | 5 | 1.00E−19 | 20.90% | Ah.00g088580.m01-v1.0.a1 |
| Hybridus | | | | | | |
| Amaranthus hybridus subsp. | tig00000163_arrow | 935318 | 6 | 3.00E−19 | 19.90% | Ah.00g139080.m01-v1.0.a1 |
| Hybridus | | | | | | |
| Amaranthus hybridus subsp. | tig00000032_arrow | 6069826 | 7 | 6.00E−19 | 20.90% | Ah.00g064960.m01-v1.0.a1 |
| Hybridus | | | | | | |
| Amaranthus hybridus subsp. | tig00000004_arrow | 9106529 | 8 | 7.00E−19 | 19.90% | Ah.00g022310.m01-v1.0.a1 |
| Hybridus | | | | | | |

### Example 7

Identification of uORFs in Cell Death Inducing Genes from an Example Weed

[0220] The protein sequence of AT4G36900 from Arabidopsis was used to identify the orthologous gene from pigweed (Amaranthus hybridus) as shown in the bottom eight rows of the above Table 3. At4g36900.1 encodes a member of the DREB subfamily A-5 of ERF/AP2 transcription factor family (RAP2.10), and was identified in a high throughput analysis as a uORF-containing gene candidate.

[0221] The following sequence was used in a sequence homology alignment search of the Amaranthus hybridus genome using BLAST at genomevolution.org/coge/CoGeBlast.pl

(AT4G36900, SEQ ID NO: 5152)
METATEVATVVSTPAVTVAAVATRKRDKPYKGIRMRKWGKWVAEIREPN
KRSRIWLGSYSTPEAAARAYDTAVFYLRGPSARLNFPELLAGVTVTGGG
GGGVNGGGDMSAAYIRRKAAEVGAQVDALEAAGAGGNRHHHHHQHQRGN
HDYVDNHSDYRINDDLMECSSKEGFKRCNGSLERVDLNKLPDPETSDDD.

[0222] The output of this sequence search identified the closest gene with sequence homology to AT4G36900 (SEQ ID NO: 5152) as Ah.03g145670.m01-v1.1.a1

[0223] Inspection of this locus in the genome using Jbrows reveal the coding sequence and its adjacent upstream sequence that corresponds to the leader region.

[0224] FIG. 7 shows Amaranthus hybridus subsp. hybridus (hybridus contigs scaffolded to hypochondriacus): polished genome contigs of Amaranthus hybridus scaffolded to pseudochromosomes of Amaranthus hypochondriacus with reveal finish (v1.0, id57429). Gray bars present putative AUG start codon is and regards represent stop codons for each of the three reading frames (noting the gene is in reverse order). In frame open reading frames that could potentially be uORF are defined by these stop-stop intervals. In this way, putative uORF of genes can be identified and tested as candidates for gene editing.

### Example 8

Identification of a Set of Genes Containing uORFs from Arabidopsis, and Subsequent Identification of the Corresponding Genes in Target Crops

[0225] To reduce the invention detailed herein to practice, codes 1 to 3 were applied to ribosome profiling data from Arabidopsis to identify a set of loci, identified by Arabidopsis genome identifiers, which are uORF-containing candidate genes (SEQ ID NO: 1 to 5155). These loci correspond to the Arabidopsis gene identifiers in the <223> comment line of each of the SEQ ID NO: 1 through 5155. Note that in some cases, a locus is represented by different gene models or multiple different gene models in the Sequence Listing, and in other instances a given model for a locus has multiple predicted uORFs. Because the presence of uORFs is often evolutionarily conserved, these data provide a road map for generation of Improved Traits through gene editing of uORFs in orthologous loci in a target crop. In one embodiment of the invention, the sequence of a polypeptide encoded by a locus which is known to produce an Improved Trait of interest when the polypeptide is present at an increased level, is compared against a set of proteins from a target crop by application of BLAST or alignment analysis. A crop locus is identified that comprises a main ORF that encodes a polypeptide that has, or has a region with, at least 30% or at least 35%, or at least 40%, or at least 45%, or at least 50%, or at least 55%, or at least 60%, 61%, 62%, 63%, 64%, 65%, 66%, 67%, 68%, 69%, 70%, 71%, 72%, 73%, 74%, 75%, 76%, 77%, 78%, 79%, 80%, 81%, 82%, 83%, 84%, 85%, 86%, 87%, 88%, 89%, 90%, 91%, 92%, 93%, 94%, 95%, 96%, 97%, 98%, or at least 99%, or about 100% identity to the polypeptide that was used for the comparison. The region of crop genomic DNA that is 1-1500 bp upstream of the start codon of the crop main ORF is then bioinformatically analyzed to identity stop-stop open reading frames upstream of the crop main ORF. A polynucleotide construct is designed to encode a guide RNA that introduces a mutation in the identified upstream open reading frame(s). The guide RNA is delivered to cells of the target crop by means of a gene editing system and crop plants are regenerated and selected that exhibit the Improved Trait of interest.

### Example 9

Detection of uORFs in Example Selected Regulatory Genes in Different Plant Species

[0226] In this example, uORFs were detected in target crops and other plants including sugar beet, Eucalyptus, broccoli, and Amaranthus. Candidate genes were identified through a homology search to genes of interest from Arabidopsis. Candidate uORF sequences were then extracted upstream of the candidate gene.

[0227] The candidate uORFs are those with any start codon (sometimes a stop, sometimes the codon after a stop if there are multiple stop codons between this and the preceding uORF) that are over fifty nucleotides. These were extracted are shown in Table 4. Three examples for LATE ELONGATED HYPOCOTYL (LHY; encodes a MYB-related putative transcription factor involved in circadian rhythm) and one for a Dehydration Responsive Element Binding” transcription factor (DREB; involved in regulation of expression of many stress-inducible genes) are provided.

TABLE 4
uORFs detected in target plants

| | | |
|---|---|---|
| Potential uORF (reading | | |
| frame 1 to 3) | Sequence Length | SEQ ID NO: |

LHY search in Beta vulgaris (sugar beet) with AT1G01060

| | | |
|---|---|---|
| ORF 1 (frame 1) | >276 | 5156 |
| ORF 2 (frame 1) | 111 | 5157 |
| ORF 3 (frame 1) | 90 | 5158 |
| ORF 4 (frame 1) | 87 | 5159 |
| ORF 5 (frame 1) | 78 | 5160 |
| ORF 6 (frame 1) | 69 | 5161 |
| ORF 7 (frame 2) | >73 | 5162 |
| ORF 8 (frame 2) | 147 | 5163 |
| ORF 9 (frame 2) | 69 | 5164 |
| ORF 10 (frame 2) | 69 | 5165 |
| ORF 11 (frame 2) | 78 | 5166 |
| ORF 12 (frame 2) | 114 | 5167 |
| ORF 13 (frame 2) | 144 | 5168 |
| ORF 14 (frame 2) | 60 | 5169 |
| ORF 15 (frame 2) | >85 | 5170 |
| ORF 16 (frame 3) | >392 | 5171 |
| ORF 17 (frame 3) | 75 | 5172 |
| ORF 18 (frame 3) | 72 | 5173 |
| ORF 19 (frame 3) | 141 | 5174 |
| ORF 20 (frame 3) | 75 | 5175 |

| | | |
|---|---|---|
| Potential uORF | Sequence Length | SEQ ID NO: |

LHY search in Eucalyptus grandis with AT1G01060

| | | |
|---|---|---|
| ORF 1 (frame 1) | >135 | 5176 |
| ORF 2 (frame 1) | 132 | 5177 |
| ORF 3 (frame 1) | 201 | 5178 |
| ORF 4 (frame 1) | 63 | 5179 |
| ORF 5 (frame 1) | >166 | 5180 |
| ORF 6 (frame 2) | >280 | 5181 |
| ORF 7 (frame 2) | 144 | 5182 |
| ORF 8 (frame 2) | 156 | 5183 |
| ORF 9 (frame 2) | 90 | 5184 |
| ORF 10 (frame 3) | >143 | 5185 |
| ORF 11 (frame 3) | 306 | 5186 |
| ORF 12 (frame 3) | 201 | 5187 |
| ORF 13 (frame 3) | >62 | 5188 |

LHY search in Brassica oleracea (broccoli) with AT1G01060

| | | |
|---|---|---|
| ORF 1 (frame 1) | 162 | 5189 |
| ORF 2 (frame 1) | 51 | 5190 |
| ORF 3 (frame 1) | 72 | 5191 |
| ORF 4 (frame 1) | 69 | 5192 |
| ORF 5 (frame 1) | 87 | 5193 |
| ORF 6 (frame 1) | 78 | 5194 |
| ORF 7 (frame 1) | 63 | 5195 |
| ORF 8 (frame 1) | >69 | 5196 |
| ORF 9 (frame 2) | 84 | 5197 |
| ORF 10 (frame 2) | 105 | 5198 |
| ORF 11 (frame 2) | 51 | 5199 |
| ORF 12 (frame 2) | 84 | 5200 |
| ORF 13 (frame 2) | 108 | 5201 |
| ORF 14 (frame 2) | 129 | 5202 |
| ORF 15 (frame 3) | >53 | 5203 |
| ORF 16 (frame 3) | 108 | 5204 |
| ORF 17 (frame 3) | 51 | 5205 |
| ORF 18 (frame 3) | 54 | 5206 |
| ORF 19 (frame 3) | 63 | 5207 |
| ORF 20 (frame 3) | 75 | 5208 |
| ORF 21 (frame 3) | 108 | 5209 |
| ORF 22 (frame 3) | 165 | 5210 |

DREB/ERF/AP2 search in Amaranthus hybridus with At4g36900.1

| | | |
|---|---|---|
| ORF 1 (frame 1) | 60 | 5211 |
| ORF 2 (frame 1) | 60 | 5212 |
| ORF 3 (frame 1) | 63 | 5213 |
| ORF 4 (frame 1) | 141 | 5214 |
| ORF 5 (frame 1) | 90 | 5215 |
| ORF 6 (frame 1) | 150 | 5216 |
| ORF 7 (frame 2) | 72 | 5217 |
| ORF 8 (frame 2) | 243 | 5218 |
| ORF 9 (frame 2) | 60 | 5219 |
| ORF 10 (frame 2) | 75 | 5220 |
| ORF 11 (frame 2) | 87 | 5221 |
| ORF 12 (frame 2) | >200 | 5222 |
| ORF 13 (frame 3) | 87 | 5223 |
| ORF 14 (frame 3) | 108 | 5224 |
| ORF 15 (frame 3) | 78 | 5225 |
| ORF 16 (frame 3) | 129 | 5226 |
| ORF 17 (frame 3) | >193 | 5227 |

### Example 10

Delivery of Delayed Flowering, Enhanced Yield and/or Increased Biomass Related Traits by Targeting CCA1 Related Genes

[0228] In a further embodiment of the invention, a crop homolog of the Arabidopsis circadian clock regulation protein LATE ELONGATED HYPOCOTYL (LHY/AT1G01060) and CIRCADIAN CLOCK ASSOCIATED 1 (CCA1/AT2G46830), which are shown to be subject to uORF regulation herein, is upregulated through knock-out or mutation of an operably linked uORF by means of gene editing or TILLING. Specifically, a genetic modification is introduced to a uORF within the endogenous locus that contains a main ORF encoding a polypeptide that has, or has a region with, at least 30% or at least 35%, or at least 40%, or at least 45%, or at least 50%, or at least 55%, or at least 60%, 61%, 62%, 63%, 64%, 65%, 66%, 67%, 68%, 69%, 70%, 71%, 72%, 73%, 74%, 75%, 76%, 77%, 78%, 79%, 80%, 81%, 82%, 83%, 84%, 85%, 86%, 87%, 88%, 89%, 90%, 91%, 92%, 93%, 94%, 95%, 96%, 97%, 98%, or at least 99%, or about 100% identity to (AT1G01060.1, SEQ ID NO: 4000) or (AT2G46830.1; SEQ ID NO: 1678). Such a genome modification produces crop plants that show a yield increase and/or delayed flowering and/or increased vegetative mass when grown in a glasshouse, growth room or field. Under such conditions, crop plants containing the targeted introduced genetic modification exhibit at least a 2% yield increase, or at least a 3% yield increase, or at least a 4% yield increase, or at least a 6% yield increase, or at least an 8% yield increase, or at least 10% yield increase, or at least a 20% yield increase, or at least a 50% yield increase, compared to control plants not harboring the genetic modification. In a particular embodiment of this example, the genetically modified crop plant is a leafy green or a forage crop, or a crop where the vegetative portion of the plant comprises the desired crop. Sugar beet, for example, is a crop of the latter category, where a large vegetative storage organ is sought, and flowering is undesirable. In another embodiment of the invention, the genetically modified crop plant is a tree crop which shows delayed flowering, or never flowers prior to harvest. This is especially desirable in transgenic trees being grown for biomass, such as Eucalyptus and poplar.

### Example 11

### Induction of Flowering by Targeting FCA Related Genes

[0229] In a further embodiment of the invention, a crop homolog of the Arabidopsis flowering time regulator FCA (AT4G16280.2; SEQ ID NO: 4788), which is shown to be subject to uORF regulation herein, is upregulated through knock-out or mutation of operably linked uORFs by means of gene editing. Specifically, a genetic modification is introduced to a uORF within the endogenous locus that contains a main ORF that encodes a polypeptide that has, or a region with, at least 30% or at least 35%, or at least 40%, or at least 45%, or at least 50%, or at least 55%, or at least 60%, 61%, 62%, 63%, 64%, 65%, 66%, 67%, 68%, 69%, 70%, 71%, 72%, 73%, 74%, 75%, 76%, 77%, 78%, 79%, 80%, 81%, 82%, 83%, 84%, 85%, 86%, 87%, 88%, 89%, 90%, 91%, 92%, 93%, 94%, 95%, 96%, 97%, 98%, or at least 99%, or about 100% identity to SEQ ID NO: 4788. Such a genome modification produces crop plants that show early flowering in a glasshouse, growth room or field. Under such conditions, crop plants containing the targeted introduced genetic modification exhibit floral structures at least 1 day earlier, 5 days earlier, 10 days earlier, 30 days earlier, 60 days earlier or 180 days earlier compared to control plants not harboring the genetic modification.

### Example 12

Method of Controlling a Weed by Identification and Targeting of uORFs from Cell Death-Inducing Genes in the Control Regions that Encode AP2 Family Transcription Factors.

[0230] In another embodiment of the invention, a weed plant is subject to ribosome profiling and the data are analyzed by application of the algorithm detailed herein to identify loci that are subject to uORF regulation. A locus is selected that has a uORF and an operably linked main ORF that encodes a polypeptide that has, or has a region with, at least 30% or at least 35%, or at least 40%, or at least 45%, or at least 50%, or at least 55%, or at least 60%, 61%, 62%, 63%, 64%, 65%, 66%, 67%, 68%, 69%, 70%, 71%, 72%, 73%, 74%, 75%, 76%, 77%, 78%, 79%, 80%, 81%, 82%, 83%, 84%, 85%, 86%, 87%, 88%, 89%, 90%, 91%, 92%, 93%, 94%, 95%, 96%, 97%, 98%, or at least 99%, or about 100% identity to the polypeptide encoded by either AT4G36900, AT2G23340, AT5G67190, or AT3G50260 (SEQ ID NO: 5152, 5153, 5154 or 5155, respectively. These proteins form a clade within the AP2 family of transcription factors. A gene editing construct is designed that encodes a guide RNA with identity to a uORF at the selected locus, which is designed to knock-out or mutate the uORF. The gene editing construct is then delivered to weeds by means of an Agrobacterium suspension coated on nanoparticles or via some other appropriate formulation. The disruption of the uORF in cells of the target weed results in increased translation of the homolog of AT4G36900, AT2G23340, AT5G67190, or AT3G50260 which leads to cell death and control of the target weed.

### Example 13

Increasing BRIX and/or Sugar Content by Targeting of uORFs from bZIP Family Transcription Factors

[0231] In another embodiment of the invention, a fruit or vegetable plant is chosen and a locus from the genome of that fruit or vegetable plant is selected that has a uORF and an operably linked main ORF that encodes a polypeptide that has, or has a region with, at least 30% or at least 35%, or at least 40%, or at least 45%, or at least 50%, or at least 55%, or at least 60%, 61%, 62%, 63%, 64%, 65%, 66%, 67%, 68%, 69%, 70%, 71%, 72%, 73%, 74%, 75%, 76%, 77%, 78%, 79%, 80%, 81%, 82%, 83%, 84%, 85%, 86%, 87%, 88%, 89%, 90%, 91%, 92%, 93%, 94%, 95%, 96%, 97%, 98%, or at least 99%, or about 100% identity to the polypeptide encoded by bZIP protein AT4G34590.1, SEQ ID NO: 4871). A gene editing construct that encodes a guide RNA with identity to a uORF at the selected locus, which has a base change designed to knock-out or mutate the uORF. The gene editing construct is then delivered to cells of the fruit or vegetable plant. Plants are then regenerated which carry a genetic modification whereby the uORF repression has been reduced or removed and the fruit or vegetable plants have increased sugar content or BRIX content, compared to control plants not harboring the genetic modification when grown in a glasshouse, growth room or field. In particular embodiment of this example, the plant is a member of the nightshade family such as tomato.

### Example 14

Increasing Cold Tolerance by Targeting of uORFs from Myb Family Transcription Factors

[0232] In another embodiment of the invention, a crop is chosen and a locus from the genome of that crop plant is selected that has a uORF and an operably linked main ORF that encodes a polypeptide that has, or has a region with, at least 30% or at least 35%, or at least 40%, or at least 45%, or at least 50%, or at least 55%, or at least 60%, 61%, 62%, 63%, 64%, 65%, 66%, 67%, 68%, 69%, 70%, 71%, 72%, 73%, 74%, 75%, 76%, 77%, 78%, 79%, 80%, 81%, 82%, 83%, 84%, 85%, 86%, 87%, 88%, 89%, 90%, 91%, 92%, 93%, 94%, 95%, 96%, 97%, 98%, or at least 99%, or about 100% identity to the polypeptide encoded by MYB protein AT1G74650 (SEQ ID NO: 4274). A gene editing construct that encodes a guide RNA with identity to a uORF at the selected locus, which has a base change designed to knock-out or mutate the uORF. The gene editing construct is then delivered to cells of the crop plant. Plants are then regenerated which carry a genetic modification whereby the uORF repression has been reduced or removed and the crop plants have increased cold tolerance, compared to control plants not harboring the genetic modification when grown in a glasshouse, growth room or field.

### Example 15

Increasing Nutritional Content or Pigmentation of Plant Tissue by Targeting uORFs in HB Family Transcription Factors that are Required for Flavonoid Production.

[0233] In another embodiment of the invention, a crop is chosen and a locus from the genome of that crop plant is selected that has a uORF and an operably linked main ORF that encodes a polypeptide that has, or a region with, at least 30% or at least 35%, or at least 40%, or at least 45%, or at least 50%, or at least 55%, or at least 60%, 61%, 62%, 63%, 64%, 65%, 66%, 67%, 68%, 69%, 70%, 71%, 72%, 73%, 74%, 75%, 76%, 77%, 78%, 79%, 80%, 81%, 82%, 83%, 84%, 85%, 86%, 87%, 88%, 89%, 90%, 91%, 92%, 93%, 94%, 95%, 96%, 97%, 98%, or at least 99%, or about 100% identity to the polypeptide encoded by homeodomain protein ANTHOCYANINLESS2 AT4G00730 (SEQ ID NO: 4731). A gene editing construct that encodes a guide RNA with identity to a uORF at the selected locus, which is designed to knock-out or mutate the uORF. The gene editing construct is then delivered to cells of the crop plant. Plants are then regenerated which carry a genetic modification whereby the uORF repression has been reduced or removed and the crop plants have increased pigment levels, compared to control plants not harboring the genetic modification when grown in a glasshouse, growth room or field.

### Example 16

Increasing Yield, Vigor, Seedling Size, Drought Tolerance, Protein Content, and/or Tolerance to Abiotic Stresses by Targeting uORFs in NF-Y (Aka HAP or CAAT) Family Transcription Factors.

[0234] The NF-Y family of transcription factors have been shown to regulate a wide range of critical processes including improved seedling vigor, flowering time, nutritional content and/or stress tolerance through transgenic approaches, including overexpression of the native forms of the genes encoding these TFs (US Patent Plants with enhanced size and growth rate (Nelson et al. 2007, PNAS 104 (42) 16450-16455; Kumimoto et al. 2008, Planta 228, 709-723; U.S. Pat. Nos. 8,927,811; 10,640,781). This example provides a way to obtain the same or similar traits, without undesirable phenotypes such as morphological abnormalities, extreme alterations in flowering time and/or dwarfing, through the alternative means of gene editing the endogenous loci encoding the genes in crop plants, and/or through overexpression of NF-Y genes with modified or deleted uORFs in the 5′UTR regions of the overexpressed transcripts.

[0235] In an embodiment of the invention, a crop is chosen and a locus from the genome of that crop plant is selected that has a uORF operably linked main ORF that encodes a polypeptide that has, or has a region with, at least 30% or at least 35%, or at least 40%, or at least 45%, or at least 50%, or at least 55%, or at least 60%, 61%, 62%, 63%, 64%, 65%, 66%, 67%, 68%, 69%, 70%, 71%, 72%, 73%, 74%, 75%, 76%, 77%, 78%, 79%, 80%, 81%, 82%, 83%, 84%, 85%, 86%, 87%, 88%, 89%, 90%, 91%, 92%, 93%, 94%, 95%, 96%, 97%, 98%, or at least 99%, or about 100% identity to the polypeptide encoded by HAP2 protein AT5G12840 (SEQ ID NO: 4961). A gene editing construct is built that encodes a guide RNA with identity to a uORF at the selected locus, which is designed to knock-out or mutate the uORF. The gene editing construct is then delivered to cells of the crop plant. Plants are then regenerated which carry a genetic modification whereby the uORF repression has been reduced or removed and a plant is selected that has increased drought tolerance, increased seedling size, increased vigor, increased abiotic stress tolerance and/or increased yield, but lacks any substantive undesirable development phenotype, as compared to control plants not harboring the genetic modification when grown in a glasshouse, growth room or field.

[0236] In a further embodiment of the invention, the NF-YC transcription factor is a member of the NF-YC4 subclade orthologous to the Arabidopsis paralogs AT3G48590 and AT5G63470, which regulate beneficial traits including enhanced vigor, increased abiotic stress tolerance, increased nutrient content and increased tolerance to biotic stress including viruses, bacteria, fungi, aphids and nematodes (U.S. Pat. No. 10,640,781; Ling Li et al. PNAS Nov. 24, 2015 112 (47) 14734-14739; Mingsheng Qi et al. Plant Biotechnology Journal (2019) 17, pp. 252-263). A crop is chosen and a locus from the genome of that crop plant is selected that has a uORF operably linked to a main ORF that encodes a polypeptide that has, or has a region with, at least 30% or at least 35%, or at least 40%, or at least 45%, or at least 50%, or at least 55%, or at least 60%, 61%, 62%, 63%, 64%, 65%, 66%, 67%, 68%, 69%, 70%, 71%, 72%, 73%, 74%, 75%, 76%, 77%, 78%, 79%, 80%, 81%, 82%, 83%, 84%, 85%, 86%, 87%, 88%, 89%, 90%, 91%, 92%, 93%, 94%, 95%, 96%, 97%, 98%, or at least 99%, or about 100% identity to the polypeptide encoded by AT3G48590 or AT5G63470. A gene editing construct is built that encodes a guide RNA with identity to a uORF at the selected locus, which is designed to knock out or mutate the uORF. The gene editing construct is then delivered to cells of the crop plant. Plants are then regenerated which carry a genetic modification whereby the uORF repression has been reduced or removed and a plant is selected that has an increased level of the polypeptide, abiotic stress tolerance, increased yield, increased vigor, increased calorific content, and/or increased nutritional content compared to control plants not harboring the genetic modification when grown in a glasshouse, growth room or field.

[0237] In a yet further embodiment of the invention, a uORF is mutated in the 5′ region comprising a genetic modification to the endogenous locus encoding a crop homolog of NF-YC4 transcription factors AT3G48590 and AT5G63470. Such a genome modification produces plants that show increased seedling vigor and/or improved abiotic stress tolerance and/or improved photosynthesis and/or increased protein levels in tissues, when grown under glasshouse conditions, field conditions and/or conditions of dehydration stress, heat stress and/or salt stress. Under such conditions, the crop plant containing this targeted introduced genetic modification comprises a non-native allele of a gene with a mutated uORF upstream of a main ORF that encodes a polypeptide with at least 30% or at least 35%, or at least 40%, or at least 45%, or at least 50%, or at least 55%, or at least 60%, 61%, 62%, 63%, 64%, 65%, 66%, 67%, 68%, 69%, 70%, 71%, 72%, 73%, 74%, 75%, 76%, 77%, 78%, 79%, 80%, 81%, 82%, 83%, 84%, 85%, 86%, 87%, 88%, 89%, 90%, 91%, 92%, 93%, 94%, 95%, 96%, 97%, 98%, or at least 99%, or about 100% identity to the polypeptide encoded by AT3G48590 or AT5G63470. A crop plant containing the aforementioned targeted genetic mutation is then selected which exhibits at least a 2% protein content increase, or at least a 3% increase in protein content, or at least a 4% increase in protein content, or at least a 6% increase in protein content, or at least an 8% increase in protein content, or at least 10% increase in protein content, or at least a 20% increase in protein content, or at least a 50% increase in protein content in its fruit, seeds, or harvested parts as compared to control crop plants not harboring the genetic modification.

[0238] In a further embodiment of the invention, the selected plant is a soybean, maize, rice, potato, tomato, or wheat plant.

[0239] In a further embodiment of the above invention the crop plant is a soybean plant and the main ORF encodes a polypeptide that has at least 70% identity to, or is identical to the sequence:

METNNQQQQQQGAQAQSGPYPVAGAGGSAGAGAGAPPPFQHLLQQQQQQ
LQMFWSYQRQEIEHVNDFKNHQLPLARIKKIMKADEDVRMISAEAPILF
AKACELFILELTIRSWLHAEENKRRTLQKNDIAAAITRTDIFDFLVDIV
PRDEIKDDAALVGATASGVPYYYPPIGQPAGMMIGRPAVDPATGVYVQP
PSQAWQSVWQSAAEDASYGTGGAGAQRSLDGQS*

[0240] In a further embodiment of the above invention the crop plant is a maize plant and the main ORF encodes a polypeptide that has at least 70% identity to, or is identical to, the maize NF-YC4 sequence:

MDNQPLPYSTGQPPAPGGAPVAGMPGAAGLPPVPHHHLLQQQAQLQAFW
AYQRQEAERASASDFKNHQLPLARIKKIMKADEDVRMISAEAPVLFAKA
CELFILELTIRSWLHAEENKRRTLQRNDVAAAIARTDVFDFLVDIVPRE
EAKEEPGSALGFAAPGTGVVGAGAPGGAPAAGMPYYYPPMGQPAPMMPA
WHVPAWDPAWQQGAADVDQSGSFSEEGQGFGAGHGGAASFPPAPPTSE*

[0241] In a further embodiment of the above invention the crop plant is a wheat plant and the main ORF encodes a polypeptide that has at least 70% identity to, or is identical to, the wheat NF-YC4 sequence:

MENHQLPYTTQPPATGAAGGAPVPGVPGPPPVPHHHLLQQQQAQLQAFW
AYQRQEAERASASDFKNHQLPLARIKKIMKADEDVRMISAEAPVLFAKA
CELFILELTIRSWLHAEENKRRTLQRNDVAAAIARTDVFDFLVDIVPRE
EAKEEPGSAALGFAAGGVGAAGGGPAAGLPYYYPPMGQPAAPMMPAWHV
PAWEPAWQQGGADVDQGAGSFGEEGQGYTGGHGGSAGFPPGPPSSD*

[0242] In a further embodiment of the above invention the crop plant is a rice plant and the main ORF encodes a polypeptide that has at least 70% identity to, or is identical to, the rice NF-YC4 sequence:

MDNQQLPYAGQPAAAGAGAPVPGVPGAGGPPAVPHHHLLQQQQAQLQAF
WAYQRQEAERASASDFKNHQLPLARIKKIMKADEDVRMISAEAPVLFAK
ACELFILELTIRSWLHAEENKRRTLQRNDVAAAIARTDVFDFLVDIVPR
EEAKEEPGSALGFAAGGPAGAVGAAGPAAGLPYYYPPMGQPAPMMPAWH
VPAWDPAWQQGAAPDVDQGAAGSFSEEGQQGFAGHGGAAASFPPAPPSS
E*

[0243] In a further embodiment of the above invention the crop plant is a tomato plant and the main ORF encodes a polypeptide that has at least 70% identity to, or is identical to, the tomato NF-YC4 sequence:

MDNQQLPYAGQPAAAGAGAPVPGVPGAGGPPAVPHHHLLQQQQAQLQAF
WAYQRQEAERASASDFKNHQLPLARIKKIMKADEDVRMISAEAPVLFAK
ACELFILELTIRSWLHAEENKRRTLQRNDVAAAIARTDVFDFLVDIVPR
EEAKEEPGSALGFAAGGPAGAVGAAGPAAGLPYYYPPMGQPAPMMPAWH
VPAWDPAWQQGAAPDVDQGAAGSFSEEGQQGFAGHGGAAASFPPAPPSS
E*

[0244] In a further embodiment of the above invention the crop plant is a potato plant and the main ORF encodes a polypeptide that has at least 70% identity to, or is identical to, the potato NF-YC4 sequence:

MDNNPHQSPTEAAAAAAAAAAAAQSATYPPQTPYHHLLQQQQQQLQMFW
TYQRQEIEQVNDFKNHQLPLARIKKIMKADEDVRMISAEAPVLFAKACE
LFILELTIRSWLHAEENKRRTLQKNDIAAAITRTDIFDFLVDIVPRDEI
KDEGVVLGPGIVGSTASGVPYYYPPMGQPAPGGVMLGRPAVPGVDPSMY
VHPPPSQAWQSVWQTGDDNSYASGGSSGQGNLDGQI*

[0245] In a further embodiment of the above invention the crop plant is a plant of the genus Gossypium and the main ORF encodes a polypeptide that has at least 70% identity to, or is identical to, the Gossypium NF-YC4 sequence:

MDSNQQTQSTPYPPQPPTSAITPPSSATATAPPFHHLLQQQQQQLQMFW
SYQRQEIEQVNDFKNHQLPLARIKKIMKADEDVRMISAEAPILFAKACE
LFILELTIRSWLHAEENKRRTLQKNDIAAAITRTDIFDFLVDIVPRDEI
KDETGLAPMVGATASGVPYFYPPMGQPAAGGPGGMMIGRPAVDPTGGIY
GQPPSQAWQSVWQTAGTDDGSYGSGVTGGQGNLDGQG*

[0246] In a further embodiment of the above invention the crop plant is a plant that is grown for animal forage or silage, for example, alfalfa, Sorghum, or a forage grass species.

[0247] In a further embodiment of the above invention, the plant is a species grown as protein source for human consumption, for example pea, pulses, bean, or chickpea.

[0248] In a yet further embodiment of the invention, a NF-YC4 group transcription factor is expressed in a transgenic plant, but the approach is improved by incorporating a form of the gene encoding the NF-YC4 transcription factor into the expression construct, which has a mutation or deletion within, or of, a uORF sequence in the 5′ UTR of the gene upstream of the main ORF that encodes the NF-YC4 TF. It is notable that prior attempts to overexpress members of this family of TFs may have been hampered by the inadvertent inclusion, by the practitioners, of uORF sequences upstream of the main ORF of the target gene being expressed. Thus, when the transgene transcript was produced, its translation would have been repressed by the presence of the uORF. By intentionally omitting or mutating such uORFs, in this example, such inadvertent repression of translation is avoided and an enhancement to the desired phenotype is obtained.

[0249] By way of further illustration to the above example, researchers have reported phenotypes of transgenic soybean and corn lines expressing NF-YC4 subunits, but the resulting plants exhibited around 40% or less seed protein in the case of soybean and a protein content of around 120 mg/g dry weight or less in the corn, based on a Lowry test (O'Conner et al. Book Chapter 6. “From Arabidopsis to Crops: The Arabidopsis QQS Orphan Gene Modulates Nitrogen Allocation across species.” In: “Engineering Nitrogen Utilization in Crop Plants.” Edited by Shrawat, Zayed and Lightfoot. Springer 2018). Furthermore, these authors did not note any striking increase in size or vigor of the transgenic plants compared to controls. Through overexpression of a variants of such transgenes that lack a uORF, or possess a mutated uORF, in the 5′ UTR, an improvement in the trait may be obtained. In a particular embodiment of this example, the improved trait in soybean is a seed protein content of greater than approximately 40% and/or the soybean plants exhibiting a greater size than controls. In a further embodiment relating to corn, the improved trait is a protein content of the seed that is greater than approximately 120 mg/g fresh weight and/or the corn plants exhibiting a greater size than controls.

### Example 17

Use of uORFs to Optimize Transgene Activity in Transgenic Organisms.

[0250] Methods for generating transgenic organisms from many species, spanning plants, animals, and microbes have been relatively for several decades. However, practitioners of these approaches face a common challenge; that of optimizing the dosage of the transgene product. Typically, a transformation method involves building a DNA construct containing the transgene of interest regulated by a heterologous promoter, or multiple copies of the transgene. The construct is then introduced into a cell of the target species, which optionally, may be selected and regenerated into a tissue or whole organism. The promoter included in the transgene construct will produce either a higher level of RNA from the transgene in a transformed cell than in a control cell or a tissue specific or a conditionally inducible pattern of expression of the transgene RNA. However, often, the level of translation of the resulting RNA cannot be precisely controlled.

Mutation of uORFs to Elevate the Expression of a Transgene or a Target Gene at its Native Locus

[0251] In some instances, a uORF represses translation from the native transcript of the gene. In such instances, a practitioner may upregulate the gene by mutating the uORF at the native locus or by overexpressing the gene using transgenic approach. In such instances, if an unrecognized uORF is present in the transgene transcript upstream of the main ORF, this can cause repression of translation and failure of the transgene to deliver the target trait. In such instances, application of the methods described herein can identify the presence of uORF(s) in the transgene 5′ region and these can be intentionally omitted, or mutated by TILLING or by gene editing if a native locus is being targeted) to weaken or remove the uORF function and enable translation of the transgene product.

[0252] A specific example of the use of this method is in optimizing activity of the REVOLUTA class of HD-ZIP class III transcription factors, of which (REV/IFL1) was the founding member. At least 5 closely related members of this clade of transcription factors are encoded by the Arabidopsis genome (Locus identifiers: AT1G30490, AT4G32880, AT2G34710, AT5G60690 and AT1G52150). The activity of these genes, and their encoded polypeptides, may be upregulated by TILLING or gene editing to obtain alleles that produce elevated levels of the proteins leading to a Trait of Interest.

[0253] The REVOUTA (REV) clade of transcription factors has critical roles in regulation of meristem behavior and development, including adaxial/abaxial patterning. When knocked out in a homozygous state, loss of function rev mutants in Arabidopsis show abnormalities in shoot morphology, including a lack of interfascicular fibers in the stem, reduced outgrowth of secondary shoot meristems, and elongated twisted leaves. If a practitioner attempts to overexpress a gene from this group and includes the native uORF upstream of the main ORF within the transgene construct downstream of the transgene promoter, the resulting transformed plants typically display a wild-type phenotype. However, if the practitioner intentionally omits the native uORF from the DNA clone, included in the transgene construct, or includes a weakened uORF variant with sequence changes versus the native uORF, the resulting transformed plants typically display one or more Improved Traits, which may include increased yield or increased biomass yield.

[0254] Additionally, one or more Improved Traits may be obtained by generating alleles through gene editing or TILLING that comprise mutations that disrupt the native uORF in one or more genes of the REV class of transcription factors at their native loci in the plant genome. As a specific example, a mutation in a uORF of a tomato gene encoding a REV homolog may be mutated through gene editing or TILLING to produce one or more Improved Traits, which may include altered leaf shape, a more compact shoot system, and/or increased yield.

Introduction of a uORF to Dampen Expression

[0255] Conversely, in transgenes that lack a “strong” uORF, a higher than optimal level of translation may produce a higher than necessary dose of the polypeptide produced by the transgene, resulting in undesirable side effects (or “off-types”), in addition to the trait of interest. Such side effects may include dwarfing, slow growth, and developmental abnormalities such as defective tissues and/or misshapen organs. In these instances, a uORF may be introduced into the 5′ region of the transgene, upstream of the start codon of the main ORF to provide a mechanism to dampen translation of the encoded protein to a more optimal level (FIG. 8). Importantly, a uORF may be introduced initially, at the time of design of the transgene construct, or after the fact, once a transgenic line or event of an organism has been selected, which harbors the transgene integrated at some particular locus in its genome, and which shows a desired phenotype, but also has undesirable off-types.

[0256] The above approach may be applied to improve or optimize existing transgenic crop events, which have publicly described, and/or which have been deregulated by, or which have been submitted for deregulation by, the USDA APHIS, which oversees the release of transgenic crops in the US. Crop events to which this approach may be applied include ZmNF-YB2 drought tolerant corn [developed by Monsanto Company®, now Bayer CropScience®, see: Nelson et al. (2007). PNAS 104 no. 42, 16450-16455], BBX32 soybean [developed by Monsanto Company, now Bayer CropScience, see: Preuss S B, Meister R, Xu Q, Urwin C P, Tripodi F A, et al. (2012) Expression of the Arabidopsis thaliana BBX32 Gene in Soybean Increases Grain Yield. PLoS ONE 7(2): e30717. doi:10.1371/journal.pone.0030717], ATHB17 corn [developed by Monsanto Company, now Bayer CropScience, see Rice E A, Khandelwal A, Creelman R A, Griffith C, Ahrens J E, et al. (2014) Expression of a Truncated ATHB17 Protein in Maize Increases Ear Weight at Silking. PLoS ONE 9(4): e94238. doi:10.1371/journal.pone.0094238], ZMM28 corn [developed by Corteva Agriscience, see: Wu et al. (2019), PNAS vol. 116, no. 47, 23851], and/or crops transformed with the drought tolerance conferring genes HaHB4, ATHB13 or ATHB7 or their homologs, and/or crops transformed with the stress tolerance conferring genes CBF1-4 or their homologs (CBF1=AT4G2549, CBF2=AT4G25470, CBF3=AT4G25480, CBF4=AT5G51990; BBX32=AT3G21150; ATHB17=AT2G01430; ATHB13=AT1G69780; ATHB7=AT2G46680).

[0257] In the above and comparable instances, the practitioner selects a uORF sequence that is at a least 30% or at least 35%, or at least 40%, or at least 45%, or at least 50%, or at least 55%, or at least 60%, 61%, 62%, 63%, 64%, 65%, 66%, 67%, 68%, 69%, 70%, 71%, 72%, 73%, 74%, 75%, 76%, 77%, 78%, 79%, 80%, 81%, 82%, 83%, 84%, 85%, 86%, 87%, 88%, 89%, 90%, 91%, 92%, 93%, 94%, 95%, 96%, 97%, 98%, or at least 99%, or about 100% identical to a uORF identified herein (SED ID NO. 2n−1, where n=1-1999 and SEQ ID NO: 5156-5227) or creates an artificial uORF, that is an open reading frame (comprising a stretch of nucleotides that begins with a start codon and ends with a stop codon, of approximately 10-300 bp in overall length) that is located upstream of, the main ORF (typically 10-500 bp upstream of the main ORF ATG, but longer or shorter distances may also be effective), and introduces the selected uORF into the transgene construct (which is subsequently introduced in a plant cell), or into the genome by gene editing, in the case of an existing stable crop event that is being engineered. The practitioner then selects a plant from amongst the resultant transformants or gene edited lines which shows an improvement in an Improved Trait (as defined herein) as compared to a control plant, (which may be a wild-type plant, or a plant of the original event, in the case where an existing transformed line is being optimized). For example, BBX32 soybean lines may be selected from a population which exhibit improved yield without delayed maturation. Similarly, gene edited ATHB17 or ZMM28 corn lines with introduced uORFs may be selected which have an even greater improvement in yield as compared to the original transgenic event, respectively, or in the case of ZMM28, a reduction in the delay of heat units to silking as described by Wu et al., supra. In the case of ZmNF-YB2 transgenic corn events expressing this transcription factor show marked yield increases compared to controls in non-irrigated dry fields but when grown in well-watered fields, the events show a reduced yield (so called “yield drag”) compared to controls. In the example presented here, a uORF may be introduced into the ZmNF-YB2 transgene (or a transgene encoding a homologous protein, including those describe by Nelson 2007, supra) to obtain improved yield in dry fields while reducing or eliminating the yield drag observed in irrigated conditions.

### Example 18

Introduction of uORFs Through Gene Editing to Generate “Knock-Down” Alleles of Target Genes.

[0258] uORFs may also be used a tool to knock-out or knock down a target gene by introducing them through gene editing into the 5′ region of the main ORF of the target gene by gene editing.

[0259] A particular example concerns the HY5 related transcription factors and their bZIP family homologs which promote photomorphogenesis. Preuss et al. supra, and Khanna et al. reported that BBX32 represses light signaling through inhibition of other BBX family proteins, as well as repression of HY5, which in species like soybean, results in beneficial features such as increased root growth, increased pod number and/or a yield increase. Thus, introduction of uORFs into the 5′ regions of these genes encoding HY5 homologs by gene editing, particularly in soybean, may produce an Improved Trait such as the aforementioned phenotypes.

[0260] In the above and comparable instances, the practitioner selects a uORF sequence that is at a least 30% or at least 35%, or at least 40%, or at least 45%, or at least 50%, or at least 55%, or at least 60%, 61%, 62%, 63%, 64%, 65%, 66%, 67%, 68%, 69%, 70%, 71%, 72%, 73%, 74%, 75%, 76%, 77%, 78%, 79%, 80%, 81%, 82%, 83%, 84%, 85%, 86%, 87%, 88%, 89%, 90%, 91%, 92%, 93%, 94%, 95%, 96%, 97%, 98%, or at least 99%, or about 100% identical to a uORF identified herein (SED ID NO. 2n−1, where n=1-1999 and SEQ ID NO: 5156-5227), or creates an artificial uORF by inserting it into the genome by gene editing, that is an open reading frame (comprising a stretch of nucleotides that begins with a start codon and ends with a stop codon, of approximately 10-300 bp in overall length) that is located upstream of the main ORF. The practitioner then selects a plant from amongst gene edited lines which shows an improvement in an Improved Trait (as defined herein) as compared to a control plant.

### Example 19

Use of a uPEP as a Biostimulant

[0261] In cases where a uORF is identified in the 5′ transcript of a gene containing a main ORF that promote a beneficial phenotype when its activity is reduced or knocked out, the uPEP encoded by the uORF may be exogenously applied as a biostimulant to obtain a desired trait. The desired trait may be improved drought tolerance, improved yield or an Improved Trait as detailed herein.

### Example 19A

[0262] A method of obtaining an Improved Trait in a plant comprising: first selecting a uORF sequence that is at a least 30% or at least 35%, or at least 40%, or at least 45%, or at least 50%, or at least 55%, or at least 60%, 61%, 62%, 63%, 64%, 65%, 66%, 67%, 68%, 69%, 70%, 71%, 72%, 73%, 74%, 75%, 76%, 77%, 78%, 79%, 80%, 81%, 82%, 83%, 84%, 85%, 86%, 87%, 88%, 89%, 90%, 91%, 92%, 93%, 94%, 95%, 96%, 97%, 98%, or at least 99%, or about 100% identical to a uORF identified herein (SED ID NO. 2n−1, where n=1-1999 and SEQ ID NO: 5156-5227), and introducing the uORF into an expression vector that enables the production of the encoded uPEP in a cell or tissue, via a process such as through fermentation. The expression vector is then introduced into a cell or tissue and the uPEP produced is harvested, processed, formulated and applied to a plant as a biostimulant.

### Example 19B

[0263] The method of EXAMPLE 19 wherein the uORF is selected from a gene, the main ORF of which encodes a homolog of the bZIP protein HY5 (AT5G11260). In a particular embodiment of this example, the uORF is derived from the HY5 locus or from a soybean homolog and a formulation of the resulting uPEP is sprayed onto soybean plants, leading to an improvement in yield.

### Example 19C

[0264] A method of inducing flowering in a crop comprising identifying a uORF in the 5′ region of a gene the main ORF of which represses flowering, introducing the uORF into an expression vector that enables the production of the encoded uPEP in a cell or tissue, such as through fermentation, introducing the expression vector into a cell or tissue, harvesting the uPEP produced from the cell or tissue and applying a formulation containing the uPEP to a vegetatively growing plant.

### Example 19D

[0265] The method of 19C wherein the main ORF encodes a homolog of CCA1 (AT2G46830), LHY (AT1G01060), FLC (AT5G10140) or TERMINAL FLOWER 1 (AT5G03840).

### Example 19E

[0266] A method of repressing or delaying flowering, or producing sterility in a crop, the method comprising identifying a uORF in the 5′ region of a gene the main ORF of which promotes flowering or floral organ development, introducing the uORF into an expression vector that enables the production of the encoded uPEP in a cell or tissue, such as through fermentation, introducing the expression vector into a cell or tissue, harvesting the uPEP produced from the cell or tissue and applying a formulation containing the uPEP to a vegetatively growing plant.

[0267] In a further embodiment of this example, the practitioner applies one or more treatments of the uPEP to the plant thereby delaying the floral transition and enabling the plant to accumulate a greater amount of photosynthetic biomass, and hence a greater yield, once treatments of the uPEP have ceased.

### Example 19F

[0268] The method of 19C wherein the main ORF encodes a homolog of CONSTANS (AT5G15840), SOC1 (AT2G45660), FLOWERING LOCUS T (AT1G65480), LEAFY (AT5G61850), FCA (AT4G16280), GIGANTEA (AT1G22770), PISTILLATA (AT5G20240), APETALA3 (AT3G54340), AGAMOUS (AT4G18960), CAULIFLOWER (AT1G26310) or APETALA 1 (AT1G69120).

[0269] The present invention is not limited by the specific embodiments described herein. The invention now being fully described, it will be apparent to one of ordinary skill in the art that many changes and modifications can be made thereto without departing from the spirit or scope of the Claims. Modifications that become apparent from the foregoing description and accompanying figures fall within the scope of the following Claims.

1-30. (canceled)

31. A method of identifying the presence of a putative upstream open reading frame (uORF) in a polynucleotide sequence in a genome of an organism through application of an algorithm to ribosome profiling data, the method including:
a) identifying an existing or putative main Open Reading Frame (main ORF) in the genome of the organism and obtaining ribosome profiling data derived from mRNA transcribed from the genome of the organism, wherein said identifying may be performed de novo or from extant knowledge;
b) evaluating ribosome occupancy of at least one region of the genome that is upstream of the main open reading frame;
c) identifying a location of the genome upstream of the main ORF where there is ribosome enrichment and downstream of said enrichment there is an abrupt drop off in ribosome occupancy;
d) identifying a stop codon of a putative uORF in the genome at, or near to, the abrupt drop off in ribosome occupancy at the location;
e) identifying a second stop codon upstream and in frame with the stop codon of the putative uORF identified in d); and
f) wherein the algorithm identifies presence of a putative uORF within the genome in the interval between the first stop codon of the putative uORF and the second upstream stop codon within the same open reading frame.

32. The method of claim 31, wherein a targeted genetic modification is introduced into the putative uORF
to create a modified uORF and translation of the main ORF operably linked to the modified uORF is increased.

33. The method of claim 32, where the modified uORF is at least 30% or at least 35%, or at least 40%, or at least 45%, or at least 50%, or at least 55%, or at least 60%, 61%, 62%, 63%, 64%, 65%, 66%, 67%, 68%, 69%, 70%, 71%, 72%, 73%, 74%, 75%, 76%, 77%, 78%, 79%, 80%, 81%, 82%, 83%, 84%, 85%, 86%, 87%, 88%, 89%, 90%, 91%, 92%, 93%, 94%, 95%, 96%, 97%, 98%, or at least 99%, or about 100% identical to the putative uORF.

34. The method of claim 32, wherein the modified uORF is reduced in function or knocked out by introducing at least one gene edit in the uORF.

35. The method of claim 32, wherein the modified uORF is reduced in function or knocked out in a plant, and the reduction or loss of function of the uORF nucleotide sequence results in increased translation of a main ORF that is operably linked to the uORF.

36. The method of claim 35, wherein the increased translation of the main ORF confers cell death, inhibition of cell division, or an Improved Trait selected from the group consisting of:
a yield increase, improved flavor, improved texture, altered circadian rhythm, accelerated flowering, accelerated senescence, delayed senescence, increased branching, reduced branching, increased apical dominance, reduced apical dominance, shade tolerance, increased root mass, increased root hair number, increased vegetative mass, increased fruit mass, improved fruit quality, increased germination rate, increased trichome length, reduced trichome length, reduced thorns, reduced spines, thornless, altered leaf shape, increased leaf number, reduced leaf number, altered leaf angle, altered leaf position, altered branch angle, increased peelability, reduced cellular adhesion, increased cellular adhesion, reduced peel thickness, reduced fruit skin thickness, increased fruit skin thickness, increased seed coat thickness, reduced seed coat thickness, seedless, reduced seed size, increased seed size, apomixis, increased embryogenesis, increased susceptibility to transgenic transformation, increased callus formation, increased embryo formation, increased root formation, increased cell division, reduced cell division, sterility, male sterility, inviable pollen, lack of stamens, lack of carpels, increased carpel number, increased petal number, reduced petal number increased trichome number, reduced trichome number, increased stem width, reduced stem width, increased internode length, reduced internode length, increased floral organ size, altered floral organ shape, reduced floral organ size, reduced fruit abscission, reduced pod shattering, altered organ abscission, variegation, increased hypocotyl length, reduced hypocotyl length, delayed flowering, elimination of flowering, sterility, improved osmotic stress tolerance, improved photosynthesis, improved nitrogen use efficiency, improved phosphorus use efficiency, improved potassium use efficiency, increased nutrient use efficiency, increased nutrient uptake, increased uptake of a metal ion, increased sequestration of a heavy metal, improved oxidative stress tolerance, increased pigment level, improved salt tolerance, improved cold tolerance, improved tolerance of freezing damage, improved freezing tolerance, improved dehydration stress, drought tolerance, improved recovery following drought, decreased wilting, increased plastid number, increased chlorophyll content, increased thylakoid density, increased photosynthetic capacity, increased respiration, reduced respiration, increased photorespiration, reduced photorespiration, increased transpiration, reduced transpiration, increased stomatal conductivity, reduced stomatal conductivity, increased carbon fixation, increased carbon sequestration, increased photosynthetic
rate, increased carotenoid level, reduced carotenoid level, increased electron transport, improved non-photochemical quenching, increased ion transport, reduced ion transport, altered carbon to nitrogen balance, increased sensitivity to a hormone, reduced sensitivity to a hormone, reduced sensitivity to ethylene, increased auxin level, reduced auxin level, increased auxin transport, increased auxin sensitivity, reduced auxin sensitivity, increased gibberellin level, reduced gibberellin increased gibberellin sensitivity, reduced gibberellin sensitivity, increased abscisic acid level, reduced abscisic acid level, increased abscisic acid sensitivity, reduced abscisic acid sensitivity, increased cytokinin level, reduced cytokinin level, increased cytokinin level, reduced cytokinin level, increased cytokinin sensitivity, reduced cytokinin sensitivity, increased jasmonate level, reduced jasmonate level, increased jasmonate sensitivity, reduced jasmonate sensitivity, increased salicylic acid level, reduced salicylic acid level, reduced salicylic acid sensitivity, increased salicylic acid sensitivity, increased strigolactone level, reduced strigolactone level, increased sensitivity to strigolactone, reduced sensitivity to strigolactone, reduced sensitivity to ethylene, increased sensitivity to ethylene, accelerated ripening, delayed ripening, reduced fruit spoilage, increased shelf life, improved heat stress, improved tolerance to low nitrogen conditions, increased seedling vigor, increased disease resistance, increased resistance to a fungal pathogen, increased resistance to bacterial pathogen, increased resistance to a viral pathogen, increased resistance to Botrytis; increased resistance to Erysiphe; increased resistance to Fusarium; increased resistance to Sclerotinia; increased rust resistance, increased resistance to Phytophthora, increased resistance to black sigatoka, increased resistance to Xanthomonas, increased resistance to a necrotrophic fungus, increased resistance to a biotrophic fungus, increase nematode resistance, increased insect resistance, herbivore resistance, increased mollusk resistance, increased protein levels, increased oil levels, reduced lignin level, increased THC level, increased CBD level, increased anthocyanin level, reduced anthocyanin level, increased nutrient level in tissue, increased vitamin level in tissue, increased carbohydrate level, reduced level of a carbohydrate, increased starch level, increased sugar level, increased BRIX, increased protein level, reduced protein level, increased level of a metabolite, increased level of photosynthetic pigments, increased lipid level, reduced lipid level, altered fatty acid saturation, increased level of saturated fat, reduced level of saturated fat, increased tocopherol level, reduced tocopherol level, increased prenyl lipid levels, increased nutritional content of tissues, increased processability, increased calorific value, reduced levels of chlorine, increased alkaloid level, reduced alkaloid level, increased wax level, reduced wax level, increased wax ester level, increased tannin level, increased taxol level, increased xanthophyll levels, increased bioplastic levels, increased level of a biopolymer, reduced levels or a biopolymer, altered starch composition, increased latex level, and increased rubber level;
as compared to a reference or control plant of the same species.

37. The method of claim 35, wherein the uORF regulates the translation of the main ORF and the increased translation of the main ORF results in a toxic effect or cell death or earlier flowering time, delayed flowering time, or bolting as compared to a reference or control plant of the same species.

38. A plant or plant cell comprising:
an introduced targeted genetic modification at a native genomic locus, wherein the introduced targeted genetic modification comprises a mutation in a uORF, wherein the native genomic locus comprises a main ORF operably linked to the uORF, wherein the main ORF encodes a polypeptide with regulatory activity, wherein the polypeptide comprises an amino acid sequence with a percentage identity to a polypeptide selected from the group consisting of SEQ ID NO: 3999-5155.
wherein the percentage identity is at least 30% or at least 35%, or at least 40%, or at least 45%, or at least 50%, or at least 55%, or at least 60%, 61%, 62%, 63%, 64%, 65%, 66%, 67%, 68%, 69%, 70%, 71%, 72%, 73%, 74%, 75%, 76%, 77%, 78%, 79%, 80%, 81%, 82%, 83%, 84%, 85%, 86%, 87%, 88%, 89%, 90%, 91%, 92%, 93%, 94%, 95%, 96%, 97%, 98%, or at least 99%, or about 100%; and
the targeted genetic modification to the uORF increases expression level and/or activity of the encoded polypeptide with regulatory activity.

39. The plant or plant cell of claim 38, wherein the introduced targeted genetic modification of the uORF results in increased translation of the main ORF operably linked to the uORF.

40. The plant or plant cell of claim 38, where the uORF with the targeted genetic modification is at least 30% or at least 35%, or at least 40%, or at least 45%, or at least 50%, or at least 55%, or at least 60%, 61%, 62%, 63%, 64%, 65%, 66%, 67%, 68%, 69%, 70%, 71%, 72%, 73%, 74%, 75%, 76%, 77%, 78%, 79%, 80%, 81%, 82%, 83%, 84%, 85%, 86%, 87%, 88%, 89%, 90%, 91%, 92%, 93%, 94%, 95%, 96%, 97%, 98%, or at least 99%, or about 100% identical to a native uORF within the native genomic locus.

41. The plant or plant cell of claim 38, wherein the uORF comprising the introduced targeted genetic modification comprises at least one gene edit.

42. The plant or plant cell of claim 38, wherein the uORF with the introduced targeted genetic modification is reduced in function or knocked out in the plant and the modification of the uORF results in increased translation of a polypeptide-encoding main ORF that is operably linked to the uORF.

43. The plant or plant cell of claim 38, wherein the main ORF encodes a polypeptide the expression of which confers cell death, inhibition of cell division, or an Improved Trait selected from the group consisting of:
a yield increase, improved flavor, improved texture, altered circadian rhythm, accelerated flowering, accelerated senescence, delayed senescence, increased branching, reduced branching, increased apical dominance, reduced apical dominance, shade tolerance, increased root mass, increased root hair number, increased vegetative mass, increased fruit mass, improved fruit quality, increased germination rate, increased trichome length, reduced trichome length, reduced thorns, reduced spines, thornless, altered leaf shape, increased leaf number, reduced leaf number, altered leaf angle, altered leaf position, altered branch angle, increased peelability, reduced cellular adhesion, increased cellular adhesion, reduced peel thickness, reduced fruit skin thickness, increased fruit skin thickness, increased seed coat thickness, reduced seed coat thickness, seedless, reduced seed size, increased seed size, apomixis, increased embryogenesis, increased susceptibility to transgenic transformation, increased callus formation, increased embryo formation, increased root formation, increased cell division, reduced cell division, sterility, male sterility, inviable pollen, lack of stamens, lack of carpels, increased carpel number, increased petal number, reduced petal number increased trichome number, reduced trichome number, increased stem width, reduced stem width, increased internode length, reduced internode length, increased floral organ size, altered floral organ shape, reduced floral organ size, reduced fruit abscission, reduced pod shattering, altered organ abscission, variegation, increased hypocotyl length, reduced hypocotyl length, delayed flowering, elimination of flowering, sterility, improved osmotic stress tolerance, improved photosynthesis, improved nitrogen use efficiency, improved phosphorus use efficiency, improved potassium use efficiency, increased nutrient use efficiency, increased nutrient uptake, increased uptake of a metal ion, increased sequestration of a heavy metal, improved oxidative stress tolerance, increased pigment level, improved salt tolerance, improved cold tolerance, improved tolerance of freezing damage, improved freezing tolerance, improved dehydration stress, drought tolerance, improved recovery following drought, decreased wilting, increased plastid number, increased chlorophyll content, increased thylakoid density, increased photosynthetic capacity, increased respiration, reduced respiration, increased photorespiration, reduced photorespiration, increased transpiration, reduced transpiration, increased stomatal conductivity, reduced stomatal conductivity, increased carbon fixation, increased carbon sequestration, increased photosynthetic rate, increased carotenoid level, reduced carotenoid level, increased electron transport, improved non-photochemical quenching, increased ion transport, reduced ion transport, altered carbon to nitrogen balance, increased sensitivity to a hormone, reduced sensitivity to a hormone, reduced sensitivity to ethylene, increased auxin level, reduced auxin level, increased auxin transport, increased auxin sensitivity, reduced auxin sensitivity, increased gibberellin level, reduced gibberellin increased gibberellin sensitivity, reduced gibberellin sensitivity, increased abscisic acid level, reduced abscisic acid level, increased abscisic acid sensitivity, reduced abscisic acid sensitivity, increased cytokinin level, reduced cytokinin level, increased cytokinin level, reduced cytokinin level, increased cytokinin sensitivity, reduced cytokinin sensitivity, increased jasmonate level, reduced jasmonate level, increased jasmonate sensitivity, reduced jasmonate sensitivity, increased salicylic acid level, reduced salicylic acid level, reduced salicylic acid sensitivity, increased salicylic acid sensitivity, increased strigolactone level, reduced strigolactone level, increased sensitivity to strigolactone, reduced sensitivity to strigolactone, reduced sensitivity to ethylene, increased sensitivity to ethylene, accelerated ripening, delayed ripening, reduced fruit spoilage, increased shelf life, improved heat stress, improved tolerance to low nitrogen conditions, increased seedling vigor, increased disease resistance, increased resistance to a fungal pathogen, increased resistance to bacterial pathogen, increased resistance to a viral pathogen, increased resistance to Botrytis; increased resistance to Erysiphe; increased resistance to Fusarium; increased resistance to Sclerotinia; increased rust resistance, increased resistance to Phytophthora, increased resistance to black sigatoka, increased resistance to Xanthomonas, increased resistance to a necrotrophic fungus, increased resistance to a biotrophic fungus, increase nematode resistance, increased insect resistance, herbivore resistance, increased mollusk resistance, increased protein levels, increased oil levels, reduced lignin level, increased THC level, increased CBD level, increased anthocyanin level, reduced anthocyanin level, increased nutrient level in tissue, increased vitamin level in tissue, increased carbohydrate level, reduced level of a carbohydrate, increased starch level, increased sugar level, increased BRIX, increased protein level, reduced protein level, increased level of a metabolite, increased level of photosynthetic pigments, increased lipid level, reduced lipid level, altered fatty acid saturation, increased level of saturated fat, reduced level of saturated fat, increased tocopherol level, reduced tocopherol level, increased prenyl lipid levels, increased nutritional content of tissues, increased processability, increased calorific value, reduced levels of chlorine, increased alkaloid level, reduced alkaloid level, increased wax level, reduced wax level, increased wax ester level, increased tannin level, increased taxol level, increased xanthophyll levels, increased bioplastic levels, increased level of a biopolymer, reduced levels or a biopolymer, altered starch composition, increased latex level, and increased rubber level;
as compared to a reference or control plant of the same species

44. The method of claim 42, wherein the introduced targeted genetic modification results in increased translation of the main ORF which results in a toxic effect or cell death or earlier flowering time, delayed flowering time, or bolting as compared to a reference or control plant of the same species.

45. A plant, the genome of which contains a non-naturally occurring allele of a gene comprising a mutation in a uORF upstream of a main ORF which encodes a protein that is a Homolog of, or which has at least 30% or at least 35%, or at least 40%, or at least 45%, or at least 50%, or at least 55%, or at least 60%, 61%, 62%, 63%, 64%, 65%, 66%, 67%, 68%, 69%, 70%, 71%, 72%, 73%, 74%, 75%, 76%, 77%, 78%, 79%, 80%, 81%, 82%, 83%, 84%, 85%, 86%, 87%, 88%, 89%, 90%, 91%, 92%, 93%, 94%, 95%, 96%, 97%, 98%, or at least 99%, or about 100% identity to, the protein encoded by CCA1 (SEQ ID NO: 4483; Arabidopsis locus AT2G46830) and wherein the plant is selected for an Improved Trait.

46. The plant of claim 45, wherein the Improved Trait is delayed flowering, increased photosynthesis, increased vegetative biomass, a more compact shoot structure, or increased yield.

The application's sequence listing, which the Patent Office published only in electronic form, follows.

SEQUENCE LISTING (5227 sequences)

SEQ ID NO: 1 - DNA, 51 bp, Arabidopsis thaliana
  source 1..51: mol_type = genomic DNA
tgaaaaacatccgcaacaattcaccaattgaagaacaagagaaaggtttaa

SEQ ID NO: 2 - protein, 15 aa, Arabidopsis thaliana
KTSATIHQLKNKRKV

SEQ ID NO: 3 - DNA, 87 bp, Arabidopsis thaliana
  source 1..87: mol_type = genomic DNA
taagtcagattgcatacttgtctcctccatggctactctcaagggtataacagtttacattatgagcagtttctaggattcctataa

SEQ ID NO: 4 - protein, 27 aa, Arabidopsis thaliana
VRLHTCLLHGYSQGYNSLHYEQFLGFL

SEQ ID NO: 5 - DNA, 117 bp, Arabidopsis thaliana
  source 1..117: mol_type = genomic DNA
tgacttctccggggagttcccggtgagatgataagtcagattgcatacttgtctcctccatggctactctcaagggttttggctgcggtggattcgtttggtttctctagaatctaa

SEQ ID NO: 6 - protein, 37 aa, Arabidopsis thaliana
LLRGVPGEMISQIAYLSPPWLLSRVLAAVDSFGFSRI

SEQ ID NO: 7 - DNA, 87 bp, Arabidopsis thaliana
  source 1..87: mol_type = genomic DNA
tgagatgataagtcagattgcatacttgtctcctccatggctactctcaagggttttggctgcggtggattcgtttggtttctctag

SEQ ID NO: 8 - protein, 27 aa, Arabidopsis thaliana
DDKSDCILVSSMATLKGFGCGGFVWFL

SEQ ID NO: 9 - DNA, 84 bp, Arabidopsis thaliana
  source 1..84: mol_type = genomic DNA
tgagatgataagtcagattgcatacttgtctcctccatggctactctcaagggtataacagtttacattatgagcagtttctag

SEQ ID NO: 10 - protein, 26 aa, Arabidopsis thaliana
DDKSDCILVSSMATLKGITVYIMSSF

SEQ ID NO: 11 - DNA, 81 bp, Arabidopsis thaliana
  source 1..81: mol_type = genomic DNA
tgacttctccggggagttcccggtgagatgataagtcagattgcatacttgtctcctccatggctactctcaagggtataa

SEQ ID NO: 12 - protein, 25 aa, Arabidopsis thaliana
LLRGVPGEMISQIAYLSPPWLLSRV

SEQ ID NO: 13 - DNA, 51 bp, Arabidopsis thaliana
  source 1..51: mol_type = genomic DNA
taaggcaagaaagccatatacaataacaaagcagcgagagcgatggactga

SEQ ID NO: 14 - protein, 15 aa, Arabidopsis thaliana
GKKAIYNNKAARAMD

SEQ ID NO: 15 - DNA, 87 bp, Arabidopsis thaliana; identical to SEQ ID NO: 3
  source 1..87: mol_type = genomic DNA

SEQ ID NO: 16 - protein, 27 aa, Arabidopsis thaliana
VRLHTCLLHGYSQGYNSLHYEQFLGFL

SEQ ID NO: 17 - DNA, 171 bp, Arabidopsis thaliana
  source 1..171: mol_type = genomic DNA
tagcttgcaatcatttcctgcgtttggatcggtctgggttttgtcgagggttttttggggaagacgaaattagggtttagttggggcaaagtaagtagtaaagaagaagaagatgcagcagcagcagtctccgcaaatgtttccgatggttccgtcgattccccctgctaa

SEQ ID NO: 18 - protein, 55 aa, Arabidopsis thaliana
LAIISCVWIGLGFVEGFLGKTKLGFSWGKVSSKEEEDAAAAVSANVSDGSVDSPC

SEQ ID NO: 19 - DNA, 111 bp, Arabidopsis thaliana
  source 1..111: mol_type = genomic DNA
tagaagaattcgtatgtcttaagttttggttcttattataatgttaggactcgtcaccctgtaagcgaaagatcagttgaaatatacaagggtttggctgatggcatttag

SEQ ID NO: 20 - protein, 35 aa, Arabidopsis thaliana
KNSYVLSFGSYYNVRTRHPVSERSVEIYKGLADGI

SEQ ID NO: 21 - DNA, 162 bp, Arabidopsis thaliana
  source 1..162: mol_type = genomic DNA
tgaaagtcccaactcgagtcaatgggtcggagtacacggagtatgttggtgttggtgctaggtttggcccaaccttggaatctaaggagaaacatgctaccctcatcaaacttgctattgctgaccctcctgattgttgcagcactcccaaaaataaggtaa

SEQ ID NO: 22 - protein, 52 aa, Arabidopsis thaliana
KSQLESMGRSTRSMLVLVLGLAQPWNLRRNMLPSSNLLLLTLLIVAALPKIR

SEQ ID NO: 23 - DNA, 63 bp, Arabidopsis thaliana
  source 1..63: mol_type = genomic DNA
taaaggtttccttctttaactaattcctcagatgacctcttgatttgttggaaaaaaaattaa

SEQ ID NO: 24 - protein, 19 aa, Arabidopsis thaliana
RFPSLTNSSDDLLICWKKN

SEQ ID NO: 25 - DNA, 96 bp, Arabidopsis thaliana
  source 1..96: mol_type = genomic DNA
taggcttttcggtttgtgatcttccgctccgctccgctaggctattacggcattttgattgaatgggtgtgggaggcaatttctgggatttgctga

SEQ ID NO: 26 - protein, 30 aa, Arabidopsis thaliana
AFRFVIFRSAPLGYYGILIEWVWEAISGIC

SEQ ID NO: 27 - DNA, 186 bp, Arabidopsis thaliana
  source 1..186: mol_type = genomic DNA
tgaaatcactccccgtctcctcttcatcttcttctgaattcgtactgtttggttaccaatgtcgttctccgattcagagtcatcctctcacggaggaggaggaggagattacaagttctttcgtcagatcagccgcgatcgattgctccacgagatgcttggatctaccaaaaccggggattctaa

SEQ ID NO: 28 - protein, 60 aa, Arabidopsis thaliana
NHSPSPLHLLLNSYCLVTNVVLRFRVILSRRRRRRLQVLSSDQPRSIAPRDAWIYQNRGF

SEQ ID NO: 29 - DNA, 186 bp, Arabidopsis thaliana; identical to SEQ ID NO: 27
  source 1..186: mol_type = genomic DNA

SEQ ID NO: 30 - protein, 60 aa, Arabidopsis thaliana; identical to SEQ ID NO: 28

SEQ ID NO: 31 - DNA, 57 bp, Arabidopsis thaliana
  source 1..57: mol_type = genomic DNA
tgatttgattctgggatctgtagctgcaatctatgtggtcatggcaccatatactaa

SEQ ID NO: 32 - protein, 17 aa, Arabidopsis thaliana
FDSGICSCNLCGHGTIY

SEQ ID NO: 33 - DNA, 66 bp, Arabidopsis thaliana
  source 1..66: mol_type = genomic DNA
tagctgcaatctatgtggtcatggcaccatatactaaggtggaagagagcttcaacgttcaggtag

SEQ ID NO: 34 - protein, 20 aa, Arabidopsis thaliana
LQSMWSWHHILRWKRASTFR

SEQ ID NO: 35 - DNA, 57 bp, Arabidopsis thaliana; identical to SEQ ID NO: 31
  source 1..57: mol_type = genomic DNA

SEQ ID NO: 36 - protein, 17 aa, Arabidopsis thaliana
FDSGICSCNLCGHGTIY

SEQ ID NO: 37 - DNA, 66 bp, Arabidopsis thaliana; identical to SEQ ID NO: 33
  source 1..66: mol_type = genomic DNA

SEQ ID NO: 38 - protein, 20 aa, Arabidopsis thaliana
LQSMWSWHHILRWKRASTFR

SEQ ID NO: 39 - DNA, 573 bp, Arabidopsis thaliana
  source 1..573: mol_type = genomic DNA
tgacgacacaaacatattacattcgacggtataatggccacaaaaccaggagtcctcaccgattggccttggacacccctcggaagtttcaagtacatcgtaatagcaccatgggctgtccatagcacatacaggtttgtgacagatgatccagagaagagggatctcgggtacttccttgtgttcccattcttgctcttcagaattctgcacaaccaggtttggatctctctgtcccgttactatacgtcctcgggaaagagacgcatcgtcgacaagggaatcgacttcaatcaggtcgacagggagaccaactgggatgaccaaatattgttcaacggagtgctgttctatataggcatcaacctattgccggaggccaaacaacttccctggtggagaactgacggagtgttgatggcagcgcttattcacaccggaccggtggagttcctctattattggctccacaaagctctccaccatcactttctttattcccgctaccattcccaccaccactcctctatcgtcactgagcccatcacttgtaactattgtttcttaccttga

SEQ ID NO: 40 - protein, 189 aa, Arabidopsis thaliana
RHKHITFDGIMATKPGVLTDWPWTPLGSFKYIVIAPWAVHSTYRFVTDDPEKRDLGYFLVFPFLLFRILHNQVWISLSRYYTSSGKRRIVDKGIDFNQVDRETNWDDQILFNGVLFYIGINLLPEAKQLPWWRTDGVLMAALIHTGPVEFLYYWLHKALHHHFLYSRYHSHHHSSIVTEPITCNYCFLP

SEQ ID NO: 41 - DNA, 135 bp, Arabidopsis thaliana
  source 1..135: mol_type = genomic DNA
tgacggagtgttgatggcagcgcttattcacaccggaccggtggagttcctctattattggctccacaaagctctccaccatcactttctttattcccgctaccattcccaccaccactcctctatcgtcactga

SEQ ID NO: 42 - protein, 43 aa, Arabidopsis thaliana
RSVDGSAYSHRTGGVPLLLAPQSSPPSLSLFPLPFPPPLLYRH

SEQ ID NO: 43 - DNA, 87 bp, Arabidopsis thaliana
  source 1..87: mol_type = genomic DNA
tgagtcctcgcttactctgagtgttatctatgtagttgcttcaatttttgtcactcatttgccttcgattcctccttaagaaactga

SEQ ID NO: 44 - protein, 27 aa, Arabidopsis thaliana
VLAYSECYLCSCFNFCHSFAFDSSLRN

SEQ ID NO: 45 - DNA, 135 bp, Arabidopsis thaliana
  source 1..135: mol_type = genomic DNA
tgacttttttggtttggtgaagttcgtcgtggggactcgggacaatataataaagatgagtcctcgcttactctgagtgttatctatgtagttgcttcaatttttgtcactcatttgccttcgattcctccttaa

SEQ ID NO: 46 - protein, 43 aa, Arabidopsis thaliana
LFWFGEVRRGDSGQYNKDESSLTLSVIYVVASIFVTHLPSIPP

SEQ ID NO: 47 - DNA, 96 bp, Arabidopsis thaliana
  source 1..96: mol_type = genomic DNA
tagaaatctctagaaaggaagcagagaatctttgaaggcgatgaagttcgtatctgtagccaaagggatatggtttcttcgaccctaatctgctaa

SEQ ID NO: 48 - protein, 30 aa, Arabidopsis thaliana
KSLERKQRIFEGDEVRICSQRDMVSSTLIC

SEQ ID NO: 49 - DNA, 78 bp, Arabidopsis thaliana
  source 1..78: mol_type = genomic DNA
tagaaaggaagcagagaatctttgaaggcgatgaagttcgtatctgtagccaaagggatatggtttcttcgaccctaa

SEQ ID NO: 50 - protein, 24 aa, Arabidopsis thaliana
KGSRESLKAMKFVSVAKGIWFLRP

SEQ ID NO: 51 - DNA, 84 bp, Arabidopsis thaliana
  source 1..84: mol_type = genomic DNA
taatttcaggaagttgcgagtttcgaaagtcaaaaagcggtttatccaggggaagtaaagggttttaagcagataagagtttga

SEQ ID NO: 52 - protein, 26 aa, Arabidopsis thaliana
FQEVASFESQKAVYPGEVKGFKQIRV

SEQ ID NO: 53 - DNA, 66 bp, Arabidopsis thaliana
  source 1..66: mol_type = genomic DNA
tgacatgcgaaatgtgcctctcagaattcttatcctacgcctgtttcaatttcttctccaccatga

SEQ ID NO: 54 - protein, 20 aa, Arabidopsis thaliana
HAKCASQNSYPTPVSISSPP

SEQ ID NO: 55 - DNA, 120 bp, Arabidopsis thaliana
  source 1..120: mol_type = genomic DNA
taaaagcagaggagaagagaagagagacggcgcagagtagcattgacatgcgaaatgtgcctctcagaattcttatcctacgcctgtttcaatttcttctccaccatgaaagttttctga

SEQ ID NO: 56 - protein, 38 aa, Arabidopsis thaliana
KQRRREERRRRVALTCEMCLSEFLSYACFNFFSTMKVF

SEQ ID NO: 57 - DNA, 156 bp, Arabidopsis thaliana
  source 1..156: mol_type = genomic DNA
tgaaccagagtttgccacgattcactcctcttctctgggaacatgcaaaacttcgtctctgtgctgatggaggcgctaatcgcatctacgacgaattgcctctcttcttccctaatgaagacgctttggccattcgaaacaggtccaactttctga

SEQ ID NO: 58 - protein, 50 aa, Arabidopsis thaliana
TRVCHDSLLFSGNMQNFVSVLMEALIASTTNCLSSSLMKTLWPFETGPTF

SEQ ID NO: 59 - DNA, 54 bp, Arabidopsis thaliana
  source 1..54: mol_type = genomic DNA
taaaaaagagtattcaagcttggtggcgccgtttgtttttggtttattcactaa

SEQ ID NO: 60 - protein, 16 aa, Arabidopsis thaliana
KRVFKLGGAVCFWFIH

SEQ ID NO: 61 - DNA, 114 bp, Arabidopsis thaliana
  source 1..114: mol_type = genomic DNA
taaaaagtaggaaccagagctgaaaaacgcctggagagagaaagagagagagatctagatgaagaaaatgagatgagaagaagaagaagaagaagaagtgaaagcgaaagctga

SEQ ID NO: 62 - protein, 36 aa, Arabidopsis thaliana
KVGTRAEKRLERERERDLDEENEMRRRRRRRSESES

SEQ ID NO: 63 - DNA, 75 bp, Arabidopsis thaliana
  source 1..75: mol_type = genomic DNA
tgaaattctctgtttccaagtttggttttttgcttcaatggcggtgatgatgcttatgcgacaggatattcataa

SEQ ID NO: 64 - protein, 23 aa, Arabidopsis thaliana
NSLFPSLVFCFNGGDDAYATGYS

SEQ ID NO: 65 - DNA, 90 bp, Arabidopsis thaliana
  source 1..90: mol_type = genomic DNA
tagtctctacaatgtcgatggaggacaccgtgctgtcatgttcaaccgattaactggtatcaaggaaaaggtttgtatttctcaaactaa

SEQ ID NO: 66 - protein, 28 aa, Arabidopsis thaliana
SLQCRWRTPCCHVQPINWYQGKGLYFSN

SEQ ID NO: 67 - DNA, 153 bp, Arabidopsis thaliana
  source 1..153: mol_type = genomic DNA
tgagtttcaacaaagttcccaacattcctggagctcctgctctctctgcccttcttaaggtcagcgttattggtgggctcggtgtctatgcccttactaatagtctctacaatgtcgatggaggacaccgtgctgtcatgttcaaccgattaa

SEQ ID NO: 68 - protein, 49 aa, Arabidopsis thaliana
VSTKFPTFLELLLSLPFLRSALLVGSVSMPLLIVSTMSMEDTVLSCSTD

SEQ ID NO: 69 - DNA, 78 bp, Arabidopsis thaliana
  source 1..78: mol_type = genomic DNA
taacttgtctgtaataactaccgaatcttcttcttcttcttattaatgttcaacaaaattcgacatttttgggtctaa

SEQ ID NO: 70 - protein, 24 aa, Arabidopsis thaliana
LVCNNYRIFFFFLLMFNKIRHFWV

SEQ ID NO: 71 - DNA, 60 bp, Arabidopsis thaliana
  source 1..60: mol_type = genomic DNA
tgaagaatctggattctggaaggctgttgttggtgtgttaaatgttggattggaagatga

SEQ ID NO: 72 - protein, 18 aa, Arabidopsis thaliana
RIWILEGCCWCVKCWIGR

SEQ ID NO: 73 - DNA, 81 bp, Arabidopsis thaliana
  source 1..81: mol_type = genomic DNA
tagggtttatcgaatcggattgttgtttctccaattataataattcaagttggttcacacagtagcgtcgacttttcatag

SEQ ID NO: 74 - protein, 25 aa, Arabidopsis thaliana
GLSNRIVVSPIIIIQVGSHSSVDFS

SEQ ID NO: 75 - DNA, 81 bp, Arabidopsis thaliana; identical to SEQ ID NO: 73
  source 1..81: mol_type = genomic DNA

SEQ ID NO: 76 - protein, 25 aa, Arabidopsis thaliana
GLSNRIVVSPIIIIQVGSHSSVDFS

SEQ ID NO: 77 - DNA, 54 bp, Arabidopsis thaliana
  source 1..54: mol_type = genomic DNA
tgacaatgtctatggcgagtttgtatcggcggtctctttcccctccggcgatag

SEQ ID NO: 78 - protein, 16 aa, Arabidopsis thaliana
QCLWRVCIGGLFPLRR

SEQ ID NO: 79 - DNA, 63 bp, Arabidopsis thaliana
  source 1..63: mol_type = genomic DNA
taaattttgcattttttttcgttggcgaatgaaggattagagagaaacagaagaaattgttaa

SEQ ID NO: 80 - protein, 19 aa, Arabidopsis thaliana
ILHFFSLANEGLERNRRNC

SEQ ID NO: 81 - DNA, 63 bp, Arabidopsis thaliana; identical to SEQ ID NO: 79
  source 1..63: mol_type = genomic DNA

SEQ ID NO: 82 - protein, 19 aa, Arabidopsis thaliana
ILHFFSLANEGLERNRRNC

SEQ ID NO: 83 - DNA, 75 bp, Arabidopsis thaliana
  source 1..75: mol_type = genomic DNA
tagagagaaaaaaaggagatccttttaatgtatcgcagaccatcctcagctatggcctcctgtttttccttttag

SEQ ID NO: 84 - protein, 23 aa, Arabidopsis thaliana
REKKEILLMYRRPSSAMASCFSF

SEQ ID NO: 85 - DNA, 75 bp, Arabidopsis thaliana; identical to SEQ ID NO: 83
  source 1..75: mol_type = genomic DNA

SEQ ID NO: 86 - protein, 23 aa, Arabidopsis thaliana
REKKEILLMYRRPSSAMASCFSF

SEQ ID NO: 87 - DNA, 312 bp, Arabidopsis thaliana
  source 1..312: mol_type = genomic DNA
tgaaaccctctgagttatatggacagtatacttggaagattccgaaattttcagaaatcactaaaagggagcatcgtagcaatgtttttgaagctggcggttacaaatggtacatggcatctgtttatctttctcatccttatatcttgtgtcacaataaaatctcgggatgtgattgttgaggctctgtgttgttctatttgtcttcaatgtgtcaggtatattttaatttatccacaaggatgtgatgtttgtaatcatctctccttgtttctctgtgttgcaaattatgataaacttcttccaggttag

SEQ ID NO: 88 - protein, 102 aa, Arabidopsis thaliana
NPLSYMDSILGRFRNFQKSLKGSIVAMFLKLAVTNGTWHLFIFLILISCVTIKSRDVIVEALCCSICLQCVRYILIYPQGCDVCNHLSLFLCVANYDKLLPG

SEQ ID NO: 89 - DNA, 54 bp, Arabidopsis thaliana
  source 1..54: mol_type = genomic DNA
tgagttatatggacagtatacttggaagattccgaaattttcagaaatcactaa

SEQ ID NO: 90 - protein, 16 aa, Arabidopsis thaliana
VIWTVYLEDSEIFRNH

SEQ ID NO: 91 - DNA, 102 bp, Arabidopsis thaliana
  source 1..102: mol_type = genomic DNA
taattattctgtgatctaaagtctgaagctttgtttggttgcatctcgatgatgatgatgatgatggttgattgtaaatgggtagtttcggtttggttgtag

SEQ ID NO: 92 - protein, 32 aa, Arabidopsis thaliana
LFCDLKSEALFGCISMMMMMMVDCKWVVSVWL

SEQ ID NO: 93 - DNA, 87 bp, Arabidopsis thaliana
  source 1..87: mol_type = genomic DNA
taatatatccaacacgacagacgaagatggtcaacttggcttccgaggaggaggaggaagacggcggcgacaacatcaaccgcctaa

SEQ ID NO: 94 - protein, 27 aa, Arabidopsis thaliana
YIQHDRRRWSTWLPRRRRKTAATTSTA

SEQ ID NO: 95 - DNA, 225 bp, Arabidopsis thaliana
  source 1..225: mol_type = genomic DNA
taagttttgaaaagtatttatctttgtggtaaatcaaagctaaaattgaggtctaaagggcaaaagggtgtcataattggtctctcgcggtggcttggcgacacggaacagagaattaatcgagaatctttttcagcttgtaaccggaattcatggcgatgcaagccggtgttcagacctctaaggtccttatcctactcggcgcaggtctctttctcactttga

SEQ ID NO: 96 - protein, 73 aa, Arabidopsis thaliana
VLKSIYLCGKSKLKLRSKGQKGVIIGLSRWLGDTEQRINRESFSACNRNSWRCKPVFRPLRSLSYSAQVSFSL

SEQ ID NO: 97 - DNA, 111 bp, Arabidopsis thaliana
  source 1..111: mol_type = genomic DNA
taattggtctctcgcggtggcttggcgacacggaacagagaattaatcgagaatctttttcagcttgtaaccggaattcatggcgatgcaagccggtgttcagacctctaa

SEQ ID NO: 98 - protein, 35 aa, Arabidopsis thaliana
LVSRGGLATRNRELIENLFQLVTGIHGDASRCSDL

SEQ ID NO: 99 - DNA, 114 bp, Arabidopsis thaliana
  source 1..114: mol_type = genomic DNA
tgaaaagtctatggcggagacaacgagttggatcccagtatggtttcctctgatggtgttgggatgttttggtctgaattggttggtcaggaaggtgaatgtgtggctctatga

SEQ ID NO: 100 - protein, 36 aa, Arabidopsis thaliana
KVYGGDNELDPSMVSSDGVGMFWSELVGQEGECVAL

SEQ ID NO: 101 - DNA, 66 bp, Arabidopsis thaliana
  source 1..66: mol_type = genomic DNA
tgattaaagtttgtttctcgtatttattccaaggtgttactccaaataaatcaaatggttatatga

SEQ ID NO: 102 - protein, 20 aa, Arabidopsis thaliana
LKFVSRIYSKVLLQINQMVI

SEQ ID NO: 103 - DNA, 72 bp, Arabidopsis thaliana
  source 1..72: mol_type = genomic DNA
tgaaaccttcaagaaaacaataaagaggaaagattaaagaagaaagataaacgactccgaagaaagatttaa

SEQ ID NO: 104 - protein, 22 aa, Arabidopsis thaliana
NLQENNKEERLKKKDKRLRRKI

SEQ ID NO: 105 - DNA, 171 bp, Arabidopsis thaliana
  source 1..171: mol_type = genomic DNA
taaagaacacgtaacctattttcaattcgcgggtttgattccatagcttcttcagatcatacattctcgcaagtgttcgatacgggagtagaagaagaagagtctttctatgctcctgatcatgatgtcttgactctgcttcaacctaacttcaccagcaacgatgtctag

SEQ ID NO: 106 - protein, 55 aa, Arabidopsis thaliana
RTRNLFSIRGFDSIASSDHTFSQVFDTGVEEEESFYAPDHDVLTLLQPNFTSNDV

SEQ ID NO: 107 - DNA, 66 bp, Arabidopsis thaliana
  source 1..66: mol_type = genomic DNA
tagggttcaaacgaagcaaaatttggaactttcagaagttgtgggtggtggcttcttgaacaataa

SEQ ID NO: 108 - protein, 20 aa, Arabidopsis thaliana
GSNEAKFGTFRSCGWWLLEQ

SEQ ID NO: 109 - DNA, 261 bp, Arabidopsis thaliana
  source 1..261: mol_type = genomic DNA
taattgagatcaaataaagcacgcatagaaaggcacgaaccttggtccttaacgtattcagagagtgagtggcaatcggagcagagtgcaagaccgctaaaccctagatcctcacattctttagtgctgagctgctcttttgctgagatcgtcgatgccaatatcaaaatcatcatcgctgataaaacaaccatcttcgccatctctctctgtttcatcaacagatcaaagtcttcgcagatccgacgctactctaactaa

SEQ ID NO: 110 - protein, 85 aa, Arabidopsis thaliana
LRSNKARIERHEPWSLTYSESEWQSEQSARPLNPRSSHSLVLSCSFAEIVDANIKIIIADKTTIFAISLCFINRSKSSQIRRYSN

SEQ ID NO: 111 - DNA, 75 bp, Arabidopsis thaliana
  source 1..75: mol_type = genomic DNA
taaaacaaccatcttcgccatctctctctgtttcatcaacagatcaaagtcttcgcagatccgacgctactctaa

SEQ ID NO: 112 - protein, 23 aa, Arabidopsis thaliana
NNHLRHLSLFHQQIKVFADPTLL

SEQ ID NO: 113 - DNA, 78 bp, Arabidopsis thaliana
  source 1..78: mol_type = genomic DNA
tgagagagatttttcggttgtagatgcagattcagagcgtatcatctctcgagaaaggatcaatgtctcatgaaataa

SEQ ID NO: 114 - protein, 24 aa, Arabidopsis thaliana
ERFFGCRCRFRAYHLSRKDQCLMK

SEQ ID NO: 115 - DNA, 147 bp, Arabidopsis thaliana
  source 1..147: mol_type = genomic DNA
tagtcacttgttgttcttactcaaagtgttcatctctctttcaccggtggatttctcgacaaagattctaactttgagagagatttttcggttgtagatgcagattcagagcgtatcatctctcgagaaaggatcaatgtctcatga

SEQ ID NO: 116 - protein, 47 aa, Arabidopsis thaliana
SLVVLTQSVHLSFTGGFLDKDSNFERDFSVVDADSERIISRERINVS

SEQ ID NO: 117 - DNA, 132 bp, Arabidopsis thaliana
  source 1..132: mol_type = genomic DNA
taggggttgtttatgtttgggaaaggaatgggcactaggcagtattcactgggagaagtagggccaccaataaatccgagagctggattgcgaagggaacaagctggtagaggttcatacagaggtagttag

SEQ ID NO: 118 - protein, 42 aa, Arabidopsis thaliana
GLFMFGKGMGTRQYSLGEVGPPINPRAGLRREQAGRGSYRGS

SEQ ID NO: 119 - DNA, 147 bp, Arabidopsis thaliana; identical to SEQ ID NO: 115
  source 1..147: mol_type = genomic DNA

SEQ ID NO: 120 - protein, 47 aa, Arabidopsis thaliana; identical to SEQ ID NO: 116

SEQ ID NO: 121 - DNA, 78 bp, Arabidopsis thaliana; identical to SEQ ID NO: 113
  source 1..78: mol_type = genomic DNA

SEQ ID NO: 122 - protein, 24 aa, Arabidopsis thaliana
ERFFGCRCRFRAYHLSRKDQCLMK

SEQ ID NO: 123 - DNA, 120 bp, Arabidopsis thaliana
  source 1..120: mol_type = genomic DNA
tgaacctgtcttaaacgcattcaggtttactacaggaggagaagctttttcagatgccaagttaatgactttattatagttgatcaggtctctgagaataggaaatggcaattcgcttga

SEQ ID NO: 124 - protein, 38 aa, Arabidopsis thaliana
TCLKRIQVYYRRRSFFRCQVNDFIIVDQVSENRKWQFA

SEQ ID NO: 125 - DNA, 84 bp, Arabidopsis thaliana
  source 1..84: mol_type = genomic DNA
tagttgatcaggtctctgagaataggaaatggcaattcgcttgacgcatctgcgaaaacctcttgcttattctcggtcctttga

SEQ ID NO: 126 - protein, 26 aa, Arabidopsis thaliana
LIRSLRIGNGNSLDASAKTSCLFSVL

SEQ ID NO: 127 - DNA, 102 bp, Arabidopsis thaliana
  source 1..102: mol_type = genomic DNA
tagattcatgaaacaaattcgtcgatggcagaggattttgatcctcgctctgctatcgatatctgtattcgctccgcttattttcgtatcgaatcggcttaa

SEQ ID NO: 128 - protein, 32 aa, Arabidopsis thaliana
IHETNSSMAEDFDPRSAIDICIRSAYFRIESA

SEQ ID NO: 129 - DNA, 51 bp, Arabidopsis thaliana
  source 1..51: mol_type = genomic DNA
tagtccaccaccacaccaaattcccccttcaccgtctctcttcgtcggtga

SEQ ID NO: 130 - protein, 15 aa, Arabidopsis thaliana
STTTPNSPFTVSLRR

SEQ ID NO: 131 - DNA, 168 bp, Arabidopsis thaliana
  source 1..168: mol_type = genomic DNA
tagttaatcaatcaaagagaagtaagagaaatggcagattctaactgtggatgtggctcctcctgcaaatgtggtgactcttgcagttgcgagaagaactacaacaaggagtgcgacaactgtagctgtggatcaaactgcagctgtgggtcaaactgtaactgttga

SEQ ID NO: 132 - protein, 54 aa, Arabidopsis thaliana
LINQREVREMADSNCGCGSSCKCGDSCSCEKNYNKECDNCSCGSNCSCGSNCNC

SEQ ID NO: 133 - DNA, 165 bp, Arabidopsis thaliana
  source 1..165: mol_type = genomic DNA
taagagaaatggcagattctaactgtggatgtggctcctcctgcaaatgtggtgactcttgcagttgcgagaagaactacaacaaggagtgcgacaactgtagctgtggatcaaactgcagctgtgggtcaaactgtaactgttgatgaaattattatggtctaa

SEQ ID NO: 134 - protein, 53 aa, Arabidopsis thaliana
EKWQILTVDVAPPANVVTLAVARRTTTRSATTVAVDQTAAVGQTVTVDEIIMV

SEQ ID NO: 135 - DNA, 54 bp, Arabidopsis thaliana
  source 1..54: mol_type = genomic DNA
tgacttttcccagctttgtattttcctatgtatggtaatggtgtgattgtgtaa

SEQ ID NO: 136 - protein, 16 aa, Arabidopsis thaliana
LFPALYFPMYGNGVIV

SEQ ID NO: 137 - DNA, 195 bp, Arabidopsis thaliana
  source 1..195: mol_type = genomic DNA
tagaactctgtgttgtactcggattcaaagttgttccctttacatgtcatatctctgttttggttattttcatgcctcaccattgaattcttcgtttcaggccactcaaccaactacgagtgctatctttcacccctgagttcactgaaagtgttcctgcttggtttgctgatgagctattgcttgtggagttag

SEQ ID NO: 138 - protein, 63 aa, Arabidopsis thaliana
NSVLYSDSKLFPLHVISLFWLFSCLTIEFFVSGHSTNYECYLSPLSSLKVFLLGLLMSYCLWS

SEQ ID NO: 139 - DNA, 117 bp, Arabidopsis thaliana
  source 1..117: mol_type = genomic DNA
tgaattcttcgtttcaggccactcaaccaactacgagtgctatctttcacccctgagttcactgaaagtgttcctgcttggtttgctgatgagctattgcttgtggagttagtttaa

SEQ ID NO: 140 - protein, 37 aa, Arabidopsis thaliana
ILRFRPLNQLRVLSFTPEFTESVPAWFADELLLVELV

SEQ ID NO: 141 - DNA, 51 bp, Arabidopsis thaliana
  source 1..51: mol_type = genomic DNA
taatgtactgccacatatcctttatatcactattacctatgtaacttctag

SEQ ID NO: 142 - protein, 15 aa, Arabidopsis thaliana
CTATYPLYHYYLCNF

SEQ ID NO: 143 - DNA, 60 bp, Arabidopsis thaliana
  source 1..60: mol_type = genomic DNA
taattgcttttctccgtcactgagtaccttgcctctcgagctcccaatcttaagtcgtaa

SEQ ID NO: 144 - protein, 18 aa, Arabidopsis thaliana
LLFSVTEYLASRAPNLKS

SEQ ID NO: 145 - DNA, 69 bp, Arabidopsis thaliana
  source 1..69: mol_type = genomic DNA
taagatttgatatccctactcttctatctgatccctccaatgaatcttgcttcaattctttcgtattag

SEQ ID NO: 146 - protein, 21 aa, Arabidopsis thaliana
DLISLLFYLIPPMNLASILSY

SEQ ID NO: 147 - DNA, 111 bp, Arabidopsis thaliana
  source 1..111: mol_type = genomic DNA
tgaccctgttctctcgggagcgcacacaatctctcttcttcttcgtcttcctcctccaatcgatgtaatcacacacacacacaaaaacacatcttttccttgttttcgtag

SEQ ID NO: 148 - protein, 35 aa, Arabidopsis thaliana
PCSLGSAHNLSSSSSSSSNRCNHTHTQKHIFSLFS

SEQ ID NO: 149 - DNA, 57 bp, Arabidopsis thaliana
  source 1..57: mol_type = genomic DNA
tagcaactagcaagtgaagatggaggcaaacgaagaaagtttgaagggaaaaattga

SEQ ID NO: 150 - protein, 17 aa, Arabidopsis thaliana
QLASEDGGKRRKFEGKN

SEQ ID NO: 151 - DNA, 66 bp, Arabidopsis thaliana
  source 1..66: mol_type = genomic DNA
tgatggagctccagctattttgaccatccaatttcaccagaaaccctaaatcacaagactatgtaa

SEQ ID NO: 152 - protein, 20 aa, Arabidopsis thaliana
WSSSYFDHPISPETLNHKTM

SEQ ID NO: 153 - DNA, 72 bp, Arabidopsis thaliana
  source 1..72: mol_type = genomic DNA
tagtttttgcacttctctctttctctcgatcgctgcttcttcgtcgctcaatctcaagctccgttccgttag

SEQ ID NO: 154 - protein, 22 aa, Arabidopsis thaliana
FLHFSLSLDRCFFVAQSQAPFR

SEQ ID NO: 155 - DNA, 69 bp, Arabidopsis thaliana
  source 1..69: mol_type = genomic DNA
taatccgatatcaggaagaagacgtcatgtttttattcgattggttctatggaatcttggcctcgttag

SEQ ID NO: 156 - protein, 21 aa, Arabidopsis thaliana
SDIRKKTSCFYSIGSMESWPR

SEQ ID NO: 157 - DNA, 168 bp, Arabidopsis thaliana
  source 1..168: mol_type = genomic DNA
tgatgctggagtgttgctcccatggagtcaatgtttcagcttcctctcctctttctcttttttcacacacagtctcttcctctattgttcttccaacatcgtctacttcttctacagcagccatcgttactctctctacctctctgtctctctcaaagccagagttag

SEQ ID NO: 158 - protein, 54 aa, Arabidopsis thaliana
CWSVAPMESMFQLPLLFLFFHTQSLPLLFFQHRLLLLQQPSLLSLPLCLSQSQS

SEQ ID NO: 159 - DNA, 141 bp, Arabidopsis thaliana
  source 1..141: mol_type = genomic DNA
tgaagctcttcaattgaagaaagaagaagaaaagacaatcgtcaaatgcttgactttggtttcagttcttcttcacgacagctcaaggaagatcggctctttgatgggatgggacaccaagaaatcaccatgggtttatga

SEQ ID NO: 160 - protein, 45 aa, Arabidopsis thaliana
SSSIEERRRKDNRQMLDFGFSSSSRQLKEDRLFDGMGHQEITMGL

SEQ ID NO: 161 - DNA, 123 bp, Arabidopsis thaliana
  source 1..123: mol_type = genomic DNA
taaagaagaagaaaagacaatcgtcaaatgcttgactttggtttcagttcttcttcacgacagctcaaggaagatcggctctttgatgggatgggacaccaagaaatcaccatgggtttatga

SEQ ID NO: 162 - protein, 39 aa, Arabidopsis thaliana
RRRKDNRQMLDFGFSSSSRQLKEDRLFDGMGHQEITMGL

SEQ ID NO: 163 - DNA, 60 bp, Arabidopsis thaliana
  source 1..60: mol_type = genomic DNA
tagaatttcagttttcaaaccaaaccttgtcgatttcaaatcaattctagtcggcagtag

SEQ ID NO: 164 - protein, 18 aa, Arabidopsis thaliana
NFSFQTKPCRFQINSSRQ

SEQ ID NO: 165 - DNA, 132 bp, Arabidopsis thaliana
  source 1..132: mol_type = genomic DNA
tgaatctctcgttttttttcctcatttttatttgattcctttttaaaaattctacattcaccccaattcaagcaaaaacagcatttgatactctttgaattgagtgtactatctcttccctcatttatctga

SEQ ID NO: 166 - protein, 42 aa, Arabidopsis thaliana
ISRFFSSFLFDSFLKILHSPQFKQKQHLILFELSVLSLPSFI

SEQ ID NO: 167 - DNA, 111 bp, Arabidopsis thaliana
  source 1..111: mol_type = genomic DNA
tgatggctacgatcgtcttcggacgcatccggtgctgtagaggatcgttactcggcttggtcttccttgccggggtggtcgcacggcggtctgacagaaaacaagagataa

SEQ ID NO: 168 - protein, 35 aa, Arabidopsis thaliana
WLRSSSDASGAVEDRYSAWSSLPGWSHGGLTENKR

SEQ ID NO: 169 - DNA, 57 bp, Arabidopsis thaliana
  source 1..57: mol_type = genomic DNA
tagaggatcgttactcggcttggtcttccttgccggggtggtcgcacggcggtctga

SEQ ID NO: 170 - protein, 17 aa, Arabidopsis thaliana
RIVTRLGLPCRGGRTAV

SEQ ID NO: 171 - DNA, 111 bp, Arabidopsis thaliana
  source 1..111: mol_type = genomic DNA
taggctcgtacctctgttctttttattttaccctcggtttttttttttttttttttttttttttttcaccctcaaaactttcaatttcttacattttcaccctttaattga

SEQ ID NO: 172 - protein, 35 aa, Arabidopsis thaliana
ARTSVLFILPSVFFFFFFFFFHPQNFQFLTFSPFN

SEQ ID NO: 173 - DNA, 195 bp, Arabidopsis thaliana
  source 1..195: mol_type = genomic DNA
tagtactctaattcaaccgagaaagtcgaatacatacacacattcataacacttttgaggaagatgttaagtggaaacaatggaaacactgcaccaccggttttcatgaacgagaaccagttgcaataccagacaaacctacgatcgaatcagcttcacttgctcggaaacagtaagtttcgttttctctcataa

SEQ ID NO: 174 - protein, 63 aa, Arabidopsis thaliana
YSNSTEKVEYIHTFITLLRKMLSGNNGNTAPPVFMNENQLQYQTNLRSNQLHLLGNSKFRFLS

SEQ ID NO: 175 - DNA, 168 bp, Arabidopsis thaliana
  source 1..168: mol_type = genomic DNA
taattcaaccgagaaagtcgaatacatacacacattcataacacttttgaggaagatgttaagtggaaacaatggaaacactgcaccaccggttttcatgaacgagaaccagttgcaataccagacaaacctacgatcgaatcagcttcacttgctcggaaacagtaa

SEQ ID NO: 176 - protein, 54 aa, Arabidopsis thaliana
FNRESRIHTHIHNTFEEDVKWKQWKHCTTGFHEREPVAIPDKPTIESASLARKQ

SEQ ID NO: 177 - DNA, 168 bp, Arabidopsis thaliana
  source 1..168: mol_type = genomic DNA
taaaagagacagagagagacgacgcattttcctttattttctcggggaaattcaaagttttcgaattttcttcctttctgggttttcgtcaaaggagcatcttctttatgttcttttgaaagaaggctctcttctctatttctctcccctcttccggggagtttttga

SEQ ID NO: 178 - protein, 54 aa, Arabidopsis thaliana
KRQRETTHFPLFSRGNSKFSNFLPFWVFVKGASSLCSFERRLSSLFLSPLPGSF

SEQ ID NO: 179 - DNA, 60 bp, Arabidopsis thaliana
  source 1..60: mol_type = genomic DNA
tgaaagaaggctctcttctctatttctctcccctcttccggggagtttttgattttttag

SEQ ID NO: 180 - protein, 18 aa, Arabidopsis thaliana
KKALFSISLPSSGEFLIF

SEQ ID NO: 181 - DNA, 168 bp, Arabidopsis thaliana; identical to SEQ ID NO: 177
  source 1..168: mol_type = genomic DNA

SEQ ID NO: 182 - protein, 54 aa, Arabidopsis thaliana; identical to SEQ ID NO: 178

SEQ ID NO: 183 - DNA, 168 bp, Arabidopsis thaliana; identical to SEQ ID NO: 177
  source 1..168: mol_type = genomic DNA

SEQ ID NO: 184 - protein, 54 aa, Arabidopsis thaliana; identical to SEQ ID NO: 178

SEQ ID NO: 185 - DNA, 60 bp, Arabidopsis thaliana
  source 1..60: mol_type = genomic DNA
tgactctgcatgcttcagactgatttcagcaacatgcatgggcttaaaatcagcttctaa

SEQ ID NO: 186 - protein, 18 aa, Arabidopsis thaliana
LCMLQTDFSNMHGLKISF

SEQ ID NO: 187 - DNA, 60 bp, Arabidopsis thaliana
  source 1..60: mol_type = genomic DNA
tgagatgatctctgcctctctcctccaccggtaagagcatcgacatcaacgctcatatag

SEQ ID NO: 188 - protein, 18 aa, Arabidopsis thaliana
DDLCLSPPPVRASTSTLI

SEQ ID NO: 189 - DNA, 60 bp, Arabidopsis thaliana
  source 1..60: mol_type = genomic DNA
tgatctctgcctctctcctccaccggtaagagcatcgacatcaacgctcatataggataa

SEQ ID NO: 190 - protein, 18 aa, Arabidopsis thaliana
SLPLSSTGKSIDINAHIG

SEQ ID NO: 191 - DNA, 117 bp, Arabidopsis thaliana
  source 1..117: mol_type = genomic DNA
tgatgttggtgtgaaccatatgatcattggtgcttatcgaatggctatttcctctttcattctggttcctatcgcctattttttggaaaggaaaataataccgaaaataacgtttag

SEQ ID NO: 192 - protein, 37 aa, Arabidopsis thaliana
CWCEPYDHWCLSNGYFLFHSGSYRLFFGKENNTENNV

SEQ ID NO: 193 - DNA, 156 bp, Arabidopsis thaliana
  source 1..156: mol_type = genomic DNA
tagagtgattttttgctaaggtttaagcaaacgaatcgccaaaaccaggatacagaggctaataagatcatcttcaaaagtgtctcactttttctaacctcgcctccaaagattcttccttttccgattccgatgaaaaggaattttgggttttag

SEQ ID NO: 194 - protein, 50 aa, Arabidopsis thaliana
SDFLLRFKQTNRQNQDTEANKIIFKSVSLFLTSPPKILPFPIPMKRNFGF

SEQ ID NO: 195 - DNA, 60 bp, Arabidopsis thaliana
  source 1..60: mol_type = genomic DNA
tgacttgacgttatctctatgactctccattctttctcaccaaccccatttccccattga

SEQ ID NO: 196 - protein, 18 aa, Arabidopsis thaliana
LDVISMTLHSFSPTPFPH

SEQ ID NO: 197 - DNA, 108 bp, Arabidopsis thaliana
  source 1..108: mol_type = genomic DNA
tgatcttatctcgatctctttctctttctagtcttgtgtagtcttcaaacttgtgatgttatctatatagtaatcacgagagagaatcatacaatagctgaaacataa

SEQ ID NO: 198 - protein, 34 aa, Arabidopsis thaliana
SYLDLFLFLVLCSLQTCDVIYIVITRENHTIAET

SEQ ID NO: 199 - DNA, 63 bp, Arabidopsis thaliana
  source 1..63: mol_type = genomic DNA
tgatcgccggaaaatggcagcgacgttaaagatcgtcgtcttccggcgaaatcctactgctga

SEQ ID NO: 200 - protein, 19 aa, Arabidopsis thaliana
SPENGSDVKDRRLPAKSYC

SEQ ID NO: 201 - DNA, 54 bp, Arabidopsis thaliana
  source 1..54: mol_type = genomic DNA
tgatacataccgtcagagattttctttacgagagaattgtcgccgacatactaa

SEQ ID NO: 202 - protein, 16 aa, Arabidopsis thaliana
YIPSEIFFTRELSPTY

SEQ ID NO: 203 - DNA, 72 bp, Arabidopsis thaliana
  source 1..72: mol_type = genomic DNA
taagtgttgacaaatgacgcatttactcttcgactttataaagagttccaagggtattttagtcataaatga

SEQ ID NO: 204 - protein, 22 aa, Arabidopsis thaliana
VLTNDAFTLRLYKEFQGYFSHK

SEQ ID NO: 205 - DNA, 147 bp, Arabidopsis thaliana
  source 1..147: mol_type = genomic DNA
taagaggtttcggttacggtctccatctccgatcaaatcacgaagtttctatcggaaattttcagtgatacataccgtcagagattttctttacgagagaattgtcgccgacatactaaagcagagttttgggtgggaattaggtaa

SEQ ID NO: 206 - protein, 47 aa, Arabidopsis thaliana
EVSVTVSISDQITKFLSEIFSDTYRQRFSLRENCRRHTKAEFWVGIR

SEQ ID NO: 207 - DNA, 225 bp, Arabidopsis thaliana
  source 1..225: mol_type = genomic DNA
tagccgccgcctctgcgattcccatcgcgatcgccttctcttcttcttcttcttcttcctctaccaaccccaaatctcaatctctcaatttctccttcctctcccgatcgtctccacgtctcttgggactttcacgaagcttcgttagctctccgatggcgactgctctcacttctgatcgtaatctccatcaggaggatcgagccatgcctcagcttcttgtaa

SEQ ID NO: 208 - protein, 73 aa, Arabidopsis thaliana
PPPLRFPSRSPSLLLLLLPLPTPNLNLSISPSSPDRLHVSWDFHEASLALRWRLLSLLIVISIRRIEPCLSFL

SEQ ID NO: 209 - DNA, 57 bp, Arabidopsis thaliana
  source 1..57: mol_type = genomic DNA
taatctccatcaggaggatcgagccatgcctcagcttcttgtaagtctttctcgtaa

SEQ ID NO: 210 - protein, 17 aa, Arabidopsis thaliana
SPSGGSSHASASCKSFS

SEQ ID NO: 211 - DNA, 69 bp, Arabidopsis thaliana
  source 1..69: mol_type = genomic DNA
taaaataaagtcgtgattttgattggacccatgattctcattcgtataaattatcatctttcggcttaa

SEQ ID NO: 212 - protein, 21 aa, Arabidopsis thaliana
NKVVILIGPMILIRINYHLSA

SEQ ID NO: 213 - DNA, 63 bp, Arabidopsis thaliana
  source 1..63: mol_type = genomic DNA
tgagttctcaggacttcgaaactcctctgctcttccctttgccaagagatcttcttccgatga

SEQ ID NO: 214 - protein, 19 aa, Arabidopsis thaliana
VLRTSKLLCSSLCQEIFFR

SEQ ID NO: 215 - DNA, 96 bp, Arabidopsis thaliana
  source 1..96: mol_type = genomic DNA
tgaaaacgtttttttttttgtttgctcttctttttggtagtttctgtttttgttaagctgagtttgaggagtgtgagtgatttgaattttgtctga

SEQ ID NO: 216 - protein, 30 aa, Arabidopsis thaliana
KRFFFCLLFFLVVSVFVKLSLRSVSDLNFV

SEQ ID NO: 217 - DNA, 78 bp, Arabidopsis thaliana
  source 1..78: mol_type = genomic DNA
tgagttcgtctttattgctcagaagaagccagagactatctcttgtggagcaaagaatatgattcaaggatcctatga

SEQ ID NO: 218 - protein, 24 aa, Arabidopsis thaliana
VRLYCSEEARDYLLWSKEYDSRIL

SEQ ID NO: 219 - DNA, 183 bp, Arabidopsis thaliana
  source 1..183: mol_type = genomic DNA
tagagaatcatcgagatttgtgcagcacaagaatcttcgattcagagagtacgattaaatttaaaggtaaggggctttatgggaatttgtaaaacaaggcatgagttcgtctttattgctcagaagaagccagagactatctcttgtggagcaaagaatatgattcaaggatcctatgagtga

SEQ ID NO: 220 - protein, 59 aa, Arabidopsis thaliana
RIIEICAAQESSIQRVRLNLKVRGFMGICKTRHEFVFIAQKKPETISCGAKNMIQGSYE

SEQ ID NO: 221 - DNA, 195 bp, Arabidopsis thaliana
  source 1..195: mol_type = genomic DNA
tagcatcttattctctttcgttcttcttatatttctgggaattttcttcaatcgattcctctttgttgtaatctcacaattagagagagagatatgtataatcagttggcgatatcttcgtcttcttcatcttcttcgtactatgaatctttgaaggttttggaagctgatgttcaacacgctaattctttgtaa

SEQ ID NO: 222 - protein, 63 aa, Arabidopsis thaliana
HLILFRSSYISGNFLQSIPLCCNLTIRERDMYNQLAISSSSSSSSYYESLKVLEADVQHANSL

SEQ ID NO: 223 - DNA, 162 bp, Arabidopsis thaliana
  source 1..162: mol_type = genomic DNA
tgaagaagccatggctcgtacgaagcaatccgcgagaaaatcacacggaggaaaagctccgacgaagcagctcgctaccaaggcggcaaggaaatctgcaccgactaccggaggagtcaagaaacctcaccgtttccgtcctggaaccgtcgctcttcgtga

SEQ ID NO: 224 - protein, 52 aa, Arabidopsis thaliana
RSHGSYEAIREKITRRKSSDEAARYQGGKEICTDYRRSQETSPFPSWNRRSS

SEQ ID NO: 225 - DNA, 213 bp, Arabidopsis thaliana
  source 1..213: mol_type = genomic DNA
taagctctcagattcttgaagaagccatggctcgtacgaagcaatccgcgagaaaatcacacggaggaaaagctccgacgaagcagctcgctaccaaggcggcaaggaaatctgcaccgactaccggaggagtcaagaaacctcaccgtttccgtcctggaaccgtcgctcttcgtgagattcgtaaataccaaaagagcacagagttgttga

SEQ ID NO: 226 - protein, 69 aa, Arabidopsis thaliana
ALRFLKKPWLVRSNPRENHTEEKLRRSSSLPRRQGNLHRLPEESRNLTVSVLEPSLFVRFVNTKRAQSC

SEQ ID NO: 227 - DNA, 117 bp, Arabidopsis thaliana
  source 1..117: mol_type = genomic DNA
tgatcagccatcggaggagaagagagaatgatagataactggatcacgagaagtcacaaatctcaaagaagaagaaagaaaaccaaaatcaagaacaataacaacaattcgcaatga

SEQ ID NO: 228 - protein, 37 aa, Arabidopsis thaliana
SAIGGEERMIDNWITRSHKSQRRRKKTKIKNNNNNSQ

SEQ ID NO: 229 - DNA, 189 bp, Arabidopsis thaliana
  source 1..189: mol_type = genomic DNA
tgagtcagattttaccgattcattgcctccattgaagcctcttttctcagattctacgcttcactgtctcttctccatgtgcgtctcctcctcctccgtttcttcagatcttgctttccggtgacggttttaatcttcttctctctggtaacacgtataaagcatggcttacctgatgtagacatgtag

SEQ ID NO: 230 - protein, 61 aa, Arabidopsis thaliana
VRFYRFIASIEASFLRFYASLSLLHVRLLLLRFFRSCFPVTVLIFFSLVTRIKHGLPDVDM

SEQ ID NO: 231 - DNA, 54 bp, Arabidopsis thaliana
  source 1..54: mol_type = genomic DNA
tgattcaatgtgaaacaaatgttgcctatacatgagaataaatggcttgattag

SEQ ID NO: 232 - protein, 16 aa, Arabidopsis thaliana
FNVKQMLPIHENKWLD

SEQ ID NO: 233 - DNA, 54 bp, Arabidopsis thaliana; identical to SEQ ID NO: 231
  source 1..54: mol_type = genomic DNA

SEQ ID NO: 234 - protein, 16 aa, Arabidopsis thaliana
FNVKQMLPIHENKWLD

SEQ ID NO: 235 - DNA, 90 bp, Arabidopsis thaliana
  source 1..90: mol_type = genomic DNA
taattcttcttcttcctcacacacaatttcactttccgattttataaaattgattcttctcttcttcttaaacccatgaagagttcatga

SEQ ID NO: 236 - protein, 28 aa, Arabidopsis thaliana
FFFFLTHNFTFRFYKIDSSLLLKPMKSS

SEQ ID NO: 237 - DNA, 78 bp, Arabidopsis thaliana
  source 1..78: mol_type = genomic DNA
tgaagatacatgaaacaacatctcattgttatgaatgttgatgcattcttttatgtaaacttaactttttacaggtga

SEQ ID NO: 238 - protein, 24 aa, Arabidopsis thaliana
RYMKQHLIVMNVDAFFYVNLTFYR

SEQ ID NO: 239 - DNA, 213 bp, Arabidopsis thaliana
  source 1..213: mol_type = genomic DNA
tgatttttttttcttcttctgaatttcgaaagaaaaaaaaactcctcgagattcaaaccatttgacacaaaggagagaagaagcatttcatttcgcgtttgtcatctaatttcaatttctgacatctcacaagatcggagaaatttaggttatagtaattttattctcatgaagcggcgacgacgatcgtcggaggagggagatggaagttag

SEQ ID NO: 240 - protein, 69 aa, Arabidopsis thaliana
FFFLLLNFERKKNSSRFKPFDTKERRSISFRVCHLISISDISQDRRNLGYSNFILMKRRRRSSEEGDGS

SEQ ID NO: 241 - DNA, 87 bp, Arabidopsis thaliana
  source 1..87: mol_type = genomic DNA
tgagctaagctaaagaacaaggaacaaaaccaaattatgtgtttgcgagatctgtctcatagtttatggagttggagaggtgtttaa

SEQ ID NO: 242 - protein, 27 aa, Arabidopsis thaliana
AKLKNKEQNQIMCLRDLSHSLWSWRGV

SEQ ID NO: 243 - DNA, 189 bp, Arabidopsis thaliana
  source 1..189: mol_type = genomic DNA
tgagccggttttctccaggatttgctagccgccggttatttacggttaatcggaagaaatggagatcggcctgcattttcaactctggaaaggaacctggaggagagggaaagttacaaggaggtagctcagagtggccgatacttcagagatgggaagttccatggggatggcagacagtttcgttaa

SEQ ID NO: 244 - protein, 61 aa, Arabidopsis thaliana
AGFLQDLLAAGYLRLIGRNGDRPAFSTLERNLEERESYKEVAQSGRYFRDGKFHGDGRQFR

SEQ ID NO: 245 - DNA, 222 bp, Arabidopsis thaliana
  source 1..222: mol_type = genomic DNA
tgatcatcgaagagtgtttcattgagactgttaatgaatattgctgtaagagaggaggaggagaatctgcttttaagcttctcgtcgtactcgtttctgggatttctcaggttctcaagtttggatttcaataagaaatctgcgtccaccgtaaaccctagatttagatgggataaggtgttctttcagataaaaggtgagaactttccgaatttaacttag

SEQ ID NO: 246 - protein, 72 aa, Arabidopsis thaliana
SSKSVSLRLLMNIAVREEEENLLLSFSSYSFLGFLRFSSLDFNKKSASTVNPRFRWDKVFFQIKGENFPNLT

SEQ ID NO: 247 - DNA, 90 bp, Arabidopsis thaliana
  source 1..90: mol_type = genomic DNA
taagtgacgatggtcggtggtgatgaatctatctcaccgtgtcggttcgagattccacacggcgagcctcgaggcttcgtcttcagctaa

SEQ ID NO: 248 - protein, 28 aa, Arabidopsis thaliana
VTMVGGDESISPCRFEIPHGEPRGFVFS

SEQ ID NO: 249 - DNA, 63 bp, Arabidopsis thaliana
  source 1..63: mol_type = genomic DNA
tgaatcataattacattgtttgttgctgaaaatatagaaatgtttagcttaattcagatatag

SEQ ID NO: 250 - protein, 19 aa, Arabidopsis thaliana
IIITLFVAENIEMFSLIQI

SEQ ID NO: 251 - DNA, 102 bp, Arabidopsis thaliana
  source 1..102: mol_type = genomic DNA
taggatctgagagagccaaagatcatggaggaaagccaagaacttgccttgacccagttgagaaaatcggtcgagaaactctcttcttctactgaggtttga

SEQ ID NO: 252 - protein, 32 aa, Arabidopsis thaliana
DLREPKIMEESQELALTQLRKSVEKLSSSTEV

SEQ ID NO: 253 - DNA, 141 bp, Arabidopsis thaliana
  source 1..141: mol_type = genomic DNA
tagtatttatcatcgttgtcaccgccgatctgtcgtcggcagatggcaaaaccattacttttacctccaattaataacccggattcgttggattgttggacgtctctgtttcttctatctagtgtttcaactccggcatag

SEQ ID NO: 254 - protein, 45 aa, Arabidopsis thaliana
YLSSLSPPICRRQMAKPLLLPPINNPDSLDCWTSLFLLSSVSTPA

SEQ ID NO: 255 - DNA, 99 bp, Arabidopsis thaliana
  source 1..99: mol_type = genomic DNA
taaattcacatcttccaattccaggaagacctaaatttcctcttttttttgccgttatctgcagagatgcgaagtttctggataattattcagatatag

SEQ ID NO: 256 - protein, 31 aa, Arabidopsis thaliana
IHIFQFQEDLNFLFFLPLSAEMRSFWIIIQI

SEQ ID NO: 257 - DNA, 108 bp, Arabidopsis thaliana
  source 1..108: mol_type = genomic DNA
tgaaaccctaatctggagaatcgccgccttctccagaaaatatctatttctataccttgttcgtttgatttccagatactgatgaaaccggatcggatctttctctag

SEQ ID NO: 258 - protein, 34 aa, Arabidopsis thaliana
NPNLENRRLLQKISISIPCSFDFQILMKPDRIFL

SEQ ID NO: 259 - DNA, 54 bp, Arabidopsis thaliana
  source 1..54: mol_type = genomic DNA
tgatttccagatactgatgaaaccggatcggatctttctctagatccgttctag

SEQ ID NO: 260 - protein, 16 aa, Arabidopsis thaliana
FPDTDETGSDLSLDPF

SEQ ID NO: 261 - DNA, 168 bp, Arabidopsis thaliana
  source 1..168: mol_type = genomic DNA
taattccttaaaaagcctcctcttcgtcttcttcttcttctcctccccagtttcgcatcattctcttcgataaccgccacatcctctgaaaccctaatctggagaatcgccgccttctccagaaaatatctatttctataccttgttcgtttgatttccagatactga

SEQ ID NO: 262 - protein, 54 aa, Arabidopsis thaliana
FLKKPPLRLLLLLLPSFASFSSITATSSETLIWRIAAFSRKYLFLYLVRLISRY

SEQ ID NO: 263 - DNA, 93 bp, Arabidopsis thaliana
  source 1..93: mol_type = genomic DNA
tgaacacagcaagcaacttggtttagttttactagaagattcctaaaaatgagatatttagcggtgacaaaaaagtttcatttttggtgctaa

SEQ ID NO: 264 - protein, 29 aa, Arabidopsis thaliana
TQQATWFSFTRRFLKMRYLAVTKKFHFWC

SEQ ID NO: 265 - DNA, 66 bp, Arabidopsis thaliana
  source 1..66: mol_type = genomic DNA
tagaagattcctaaaaatgagatatttagcggtgacaaaaaagtttcatttttggtgctaatgtag

SEQ ID NO: 266 - protein, 20 aa, Arabidopsis thaliana
KIPKNEIFSGDKKVSFLVLM

SEQ ID NO: 267 - DNA, 57 bp, Arabidopsis thaliana
  source 1..57: mol_type = genomic DNA
tagaggcgtcacaaggcatcgatggactggaaggtacgaagcacatttgtgggataa

SEQ ID NO: 268 - protein, 17 aa, Arabidopsis thaliana
RRHKASMDWKVRSTFVG

SEQ ID NO: 269 - DNA, 57 bp, Arabidopsis thaliana
  source 1..57: mol_type = genomic DNA
tgattgcagtttccgtttcgattatcgttaatggtgtttttgtttccgggaaagtga

SEQ ID NO: 270 - protein, 17 aa, Arabidopsis thaliana
LQFPFRLSLMVFLFPGK

SEQ ID NO: 271 - DNA, 63 bp, Arabidopsis thaliana
  source 1..63: mol_type = genomic DNA
tagactgaaaccaccggaagacgacggtacgaaccgttaattaacagccgtcaaaagacgtga

SEQ ID NO: 272 - protein, 19 aa, Arabidopsis thaliana
TETTGRRRYEPLINSRQKT

SEQ ID NO: 273 - DNA, 126 bp, Arabidopsis thaliana
  source 1..126: mol_type = genomic DNA
taatggcgggtgattgtgcgattgacaccgagaaatactctctgctggaggattttaatgtcgatgttgaagtcgaaaacaaagcatttgagactttctcactttgtttttgggtttatctcttag

SEQ ID NO: 274 - protein, 40 aa, Arabidopsis thaliana
WRVIVRLTPRNTLCWRILMSMLKSKTKHLRLSHFVFGFIS

SEQ ID NO: 275 - DNA, 165 bp, Arabidopsis thaliana
  source 1..165: mol_type = genomic DNA
tgaagaactccaattcggggagcacctcgtctttcagctcaggtaacaattccttctggtaatcatgatcgcaaaatcaaactagggatttcgattccctcttttatagttggattgggtaagagccacgatgaaatttacggaggaggcggatttttcttctag

SEQ ID NO: 276 - protein, 53 aa, Arabidopsis thaliana
RTPIRGAPRLSAQVTIPSGNHDRKIKLGISIPSFIVGLGKSHDEIYGGGGFFF

SEQ ID NO: 277 - DNA, 54 bp, Arabidopsis thaliana
  source 1..54: mol_type = genomic DNA
tgaatcaaaggatttggttatggtgatgacgcgatcttcgattcgattcggtga

SEQ ID NO: 278 - protein, 16 aa, Arabidopsis thaliana
IKGFGYGDDAIFDSIR

SEQ ID NO: 279 - DNA, 78 bp, Arabidopsis thaliana
  source 1..78: mol_type = genomic DNA
taaaactatggaatggaatgtgaatcaaaggatttggttatggtgatgacgcgatcttcgattcgattcggtgattaa

SEQ ID NO: 280 - protein, 24 aa, Arabidopsis thaliana
NYGMECESKDLVMVMTRSSIRFGD

SEQ ID NO: 281 - DNA, 78 bp, Arabidopsis thaliana; identical to SEQ ID NO: 279
  source 1..78: mol_type = genomic DNA

SEQ ID NO: 282 - protein, 24 aa, Arabidopsis thaliana
NYGMECESKDLVMVMTRSSIRFGD

SEQ ID NO: 283 - DNA, 54 bp, Arabidopsis thaliana; identical to SEQ ID NO: 277
  source 1..54: mol_type = genomic DNA

SEQ ID NO: 284 - protein, 16 aa, Arabidopsis thaliana
IKGFGYGDDAIFDSIR

SEQ ID NO: 285 - DNA, 75 bp, Arabidopsis thaliana
  source 1..75: mol_type = genomic DNA
tgaatagaaattccaaaggaagagcatggtatgataaaatctaccgtaaattggcatctcaggtacttttgctag

SEQ ID NO: 286 - protein, 23 aa, Arabidopsis thaliana
IEIPKEEHGMIKSTVNWHLRYFC

SEQ ID NO: 287 - DNA, 57 bp, Arabidopsis thaliana
  source 1..57: mol_type = genomic DNA
taaacaatggcggacaacacaggatccggtacgtccatctctctattttatgtctga

SEQ ID NO: 288 - protein, 17 aa, Arabidopsis thaliana
TMADNTGSGTSISLFYV

SEQ ID NO: 289 - DNA, 60 bp, Arabidopsis thaliana
  source 1..60: mol_type = genomic DNA
taaagtttgaaacttttttattgtttcactaggcttgcgttaatggcgacagttgtgtga

SEQ ID NO: 290 - protein, 18 aa, Arabidopsis thaliana
SLKLFYCFTRLALMATVV

SEQ ID NO: 291 - DNA, 78 bp, Arabidopsis thaliana
  source 1..78: mol_type = genomic DNA
tgatgtgatcaagacaagagagctcgagaagcacttgcaagatgttggattgtacgagagcaaggaggaagctgttag

SEQ ID NO: 292 - protein, 24 aa, Arabidopsis thaliana
CDQDKRAREALARCWIVREQGGSC

SEQ ID NO: 293 - DNA, 99 bp, Arabidopsis thaliana
  source 1..99: mol_type = genomic DNA
tgatcaagacaagagagctcgagaagcacttgcaagatgttggattgtacgagagcaaggaggaagctgttagaagggaggaggttctggggatactag

SEQ ID NO: 294 - protein, 31 aa, Arabidopsis thaliana
SRQESSRSTCKMLDCTRARRKLLEGRRFWGY

SEQ ID NO: 295 - DNA, 69 bp, Arabidopsis thaliana
  source 1..69: mol_type = genomic DNA
tagatacaactgcaaacatatatgatggctttgtctaataagaagacgacgacttgggcaccgctttga

SEQ ID NO: 296 - protein, 21 aa, Arabidopsis thaliana
IQLQTYMMALSNKKTTTWAPL

SEQ ID NO: 297 - DNA, 69 bp, Arabidopsis thaliana; identical to SEQ ID NO: 295
  source 1..69: mol_type = genomic DNA

SEQ ID NO: 298 - protein, 21 aa, Arabidopsis thaliana
IQLQTYMMALSNKKTTTWAPL

SEQ ID NO: 299 - DNA, 81 bp, Arabidopsis thaliana
  source 1..81: mol_type = genomic DNA
tgatctccattgagagtcttgctacttgatttggattccgatttaaggttttctcgagaattcttttgctgcagttattag

SEQ ID NO: 300 - protein, 25 aa, Arabidopsis thaliana
SPLRVLLLDLDSDLRFSREFFCCSY

SEQ ID NO: 301 - DNA, 90 bp, Arabidopsis thaliana
  source 1..90: mol_type = genomic DNA
taatttgatttctcgagaaaaaaaaaaggaagcagaagaagattcttattttatctttacactgttcagaaatcttcggtggacggataa

SEQ ID NO: 302 - protein, 28 aa, Arabidopsis thaliana
FDFSRKKKGSRRRFLFYLYTVQKSSVDG

SEQ ID NO: 303 - DNA, 99 bp, Arabidopsis thaliana
  source 1..99: mol_type = genomic DNA
taacgatctcgagtatcacaaaagaacaagatgtctattcgaagaatctaccgatgtctgaattctttaatcaaaagatcttgtgctcaatctctatga

SEQ ID NO: 304 - protein, 31 aa, Arabidopsis thaliana
RSRVSQKNKMSIRRIYRCLNSLIKRSCAQSL

SEQ ID NO: 305 - DNA, 261 bp, Arabidopsis thaliana
  source 1..261: mol_type = genomic DNA
tgatcggagattgctaaatcagacggcgaaagaaactccgtcgtcttcgtccatgacctccgtatagactacgcctttaagctgttaagaaatctcgtatatagagaagggactgtgacacctggcaatgatgaaacagcacatgttatagaggagcttgaaaacgaaaatgttgtggaagattttgcaaatataacttcgcctgctgggaagtcgtttcttatgaggctcttcagattgtccaagtccatcatctactag

SEQ ID NO: 306 - protein, 85 aa, Arabidopsis thaliana
SEIAKSDGERNSVVFVHDLRIDYAFKLLRNLVYREGTVTPGNDETAHVIEELENENVVEDFANITSPAGKSFLMRLFRLSKSIIY

SEQ ID NO: 307 - DNA, 75 bp, Arabidopsis thaliana
  source 1..75: mol_type = genomic DNA
tgaattcttctcttgtttcgacgcaaacacccatttttgtttcctctgtttctgctgcgaaagacccctttttaa

SEQ ID NO: 308 - protein, 23 aa, Arabidopsis thaliana
ILLLFRRKHPFLFPLFLLRKTPF

SEQ ID NO: 309 - DNA, 60 bp, Arabidopsis thaliana
  source 1..60: mol_type = genomic DNA
taaagttttcatttttttggttttttgttgatggaaaaagtattgatccaacggctgtag

SEQ ID NO: 310 - protein, 18 aa, Arabidopsis thaliana
SFHFFGFLLMEKVLIQRL

SEQ ID NO: 311 - DNA, 78 bp, Arabidopsis thaliana
  source 1..78: mol_type = genomic DNA
taaaaagaagaaaaaagcttttgtttctttttccttagcagcagaatgatttttgtttccaaaattattactatttag

SEQ ID NO: 312 - protein, 24 aa, Arabidopsis thaliana
KEEKSFCFFFLSSRMIFVSKIITI

SEQ ID NO: 313 - DNA, 66 bp, Arabidopsis thaliana
  source 1..66: mol_type = genomic DNA
tagcagcagaatgatttttgtttccaaaattattactatttagtttctctcgtgctcttctcttga

SEQ ID NO: 314 - protein, 20 aa, Arabidopsis thaliana
QQNDFCFQNYYYLVSLVLFS

SEQ ID NO: 315 - DNA, 60 bp, Arabidopsis thaliana
  source 1..60: mol_type = genomic DNA
tgatctttccctctctcagcaatgcatgatcttcgattttctatcagtgttcaaagctga

SEQ ID NO: 316 - protein, 18 aa, Arabidopsis thaliana
SFPLSAMHDLRFSISVQS

SEQ ID NO: 317 - DNA, 90 bp, Arabidopsis thaliana
  source 1..90: mol_type = genomic DNA
tagacttcaacaggacagatctttcttctctttccagatcctaaaatcttcatctcctacagatctgcagaaatggcggttacgtactga

SEQ ID NO: 318 - protein, 28 aa, Arabidopsis thaliana
TSTGQIFLLFPDPKIFISYRSAEMAVTY

SEQ ID NO: 319 - DNA, 171 bp, Arabidopsis thaliana
  source 1..171: mol_type = genomic DNA
tagctgagtttcttattgcttatctatatattatgtatcaaatctccttgtttgatctatgatcatctttctagggttttgctcgatttcccggattcgggtgggaaatcatcatctgatcgattatcgcggctggacatggagaaacagagtgagcagggtacgttatag

SEQ ID NO: 320 - protein, 55 aa, Arabidopsis thaliana
LSFLLLIYILCIKSPCLIYDHLSRVLLDFPDSGGKSSSDRLSRLDMEKQSEQGTL

SEQ ID NO: 321 - DNA, 108 bp, Arabidopsis thaliana
  source 1..108: mol_type = genomic DNA
tgaatctttaaatatcttttagcgtttgcgattgtgttattgcctctgttctgtgttcaatgggaatcttcccttttgggacagaatgattctcttttctcgttttag

SEQ ID NO: 322 - protein, 34 aa, Arabidopsis thaliana
IFKYLLAFAIVLLPLFCVQWESSLLGQNDSLFSF

SEQ ID NO: 323 - DNA, 51 bp, Arabidopsis thaliana
  source 1..51: mol_type = genomic DNA
tgaaacagtctgcgtctctccacgcaaaggctcaatttttacaaaccatga

SEQ ID NO: 324 - protein, 15 aa, Arabidopsis thaliana
NSLRLSTQRLNFYKP

SEQ ID NO: 325 - DNA, 105 bp, Arabidopsis thaliana
  source 1..105: mol_type = genomic DNA
tgattattattttttgtatactttctgtgttttttttctcccttgctttttggaaattctcctacaagagatgaaatcatcaagacactttacttctttatgtaa

SEQ ID NO: 326 - protein, 33 aa, Arabidopsis thaliana
LLFFVYFLCFFSPLLFGNSPTRDEIIKTLYFFM

SEQ ID NO: 327 - DNA, 57 bp, Arabidopsis thaliana
  source 1..57: mol_type = genomic DNA
tgaaccctctcaagcaagcttcttcgatcttccgagcttagtttcgtttctaaatag

SEQ ID NO: 328 - protein, 17 aa, Arabidopsis thaliana
TLSSKLLRSSELSFVSK

SEQ ID NO: 329 - DNA, 351 bp, Arabidopsis thaliana
  source 1..351: mol_type = genomic DNA
tagagaatcaacaatgattattgtggtgatggaaatgtcgtgaaaaccagagaagaatcacaaataaaaaacagaacagacaatactttcattttgaatctcttgaaaccagtgtgtactcttaaagagaaagacttttggttttgtctccattggaacacgaatctctctctctctgtctggcgtagagacgaaggtaaaagcgccgcgtgtatagccttcaatggcttttcaacggcggcgcaacaattactacaaccgtctccgtcgtcttcttcctttcatttgcgctgtctctggagctcttctcatcctcttcgctcttctctccattctttcccctcctcctga

SEQ ID NO: 330 - protein, 115 aa, Arabidopsis thaliana
RINNDYCGDGNVVKTREESQIKNRTDNTFILNLLKPVCTLKEKDFWFCLHWNTNLSLSVWRRDEGKSAACIAFNGFSTAAQQLLQPSPSSSSFHLRCLWSSSHPLRSSLHSFPSS

SEQ ID NO: 331 - DNA, 111 bp, Arabidopsis thaliana
  source 1..111: mol_type = genomic DNA
taaaatcaaagtagtgtctctaccgtgatttttatttttttctatatactgtttaaacctcagtttttttgttgttgttataagatccttgtcattttttgtcgtgattag

SEQ ID NO: 332 - protein, 35 aa, Arabidopsis thaliana
NQSSVSTVIFIFFYILFKPQFFCCCYKILVIFCRD

SEQ ID NO: 333 - DNA, 306 bp, Arabidopsis thaliana
  source 1..306: mol_type = genomic DNA
taaatccctaaaaccactcaaaatcatccctctttctctcctccccattttccccaacgcttgattcgaattcgtctctctcgttttctgttgttctaccaattgagcaaccctagaatcattcttgtgtacctaccggaaccgagtcttctcttcttccgtggcacatctttcaaagttttaaaccccttttcccctaacttcttttcatttttctgtttttttcccgggaaattttctctctctctctctattttttgtttctctcgtcatgatcattacttgtcaagtatgatcctttattag

SEQ ID NO: 334 - protein, 100 aa, Arabidopsis thaliana
IPKTTQNHPSFSPPHFPQRLIRIRLSRFLLFYQLSNPRIILVYLPEPSLLFFRGTSFKVLNPFSPNFFSFFCFFPGKFSLSLSIFCFSRHDHYLSSMILY

SEQ ID NO: 335 - DNA, 54 bp, Arabidopsis thaliana
  source 1..54: mol_type = genomic DNA
tagaatctcctcttttcaaatttatatgttctgtttcttcatcttcaggtttaa

SEQ ID NO: 336 - protein, 16 aa, Arabidopsis thaliana
NLLFSNLYVLFLHLQV

SEQ ID NO: 337 - DNA, 198 bp, Arabidopsis thaliana
  source 1..198: mol_type = genomic DNA
tgaattgttttttgttccgtcaatcttccgagtttgtttttgcctaatatgaagttaaacccattacagaaaaaggctatattcatatttgatttctatcaatggatccgaggaattcgagtgcgtggggtgggggtgatggtctcccccttatctcatccatgggaggtgttgaatcaaagaatagatgctgtgtga

SEQ ID NO: 338 - protein, 64 aa, Arabidopsis thaliana
IVFCSVNLPSLFLPNMKLNPLQKKAIFIFDFYQWIRGIRVRGVGVMVSPLSHPWEVLNQRIDAV

SEQ ID NO: 339 - DNA, 135 bp, Arabidopsis thaliana
  source 1..135: mol_type = genomic DNA
tagcagtctcttcccggaggttttcttcattctcgccgtcgaggttggacttcagtaatctgcggcggagagtcaatgcaccatcgccgaggcgcctcgtggttcgcgccgctagaactgagtcagccggagtaa

SEQ ID NO: 340 - protein, 43 aa, Arabidopsis thaliana
QSLPGGFLHSRRRGWTSVICGGESMHHRRGASWFAPLELSQPE

SEQ ID NO: 341 - DNA, 93 bp, Arabidopsis thaliana
  source 1..93: mol_type = genomic DNA
tgagagaagttaattccttttctaaatttagggtttctcttcatcgagatgtttcttttaaatgatattcttcttctttcagtaatggaataa

SEQ ID NO: 342 - protein, 29 aa, Arabidopsis thaliana
EKLIPFLNLGFLFIEMFLLNDILLLSVME

SEQ ID NO: 343 - DNA, 93 bp, Arabidopsis thaliana; identical to SEQ ID NO: 341
  source 1..93: mol_type = genomic DNA

SEQ ID NO: 344 - protein, 29 aa, Arabidopsis thaliana
EKLIPFLNLGFLFIEMFLLNDILLLSVME

SEQ ID NO: 345 - DNA, 108 bp, Arabidopsis thaliana
  source 1..108: mol_type = genomic DNA
tgaaggcttcgtgatcatcagtctcgaatctatgtcttccttcgttccacacgatcttcggtttctccgtcgccgtccccgtcgccattttatctgttatctctctaa

SEQ ID NO: 346 - protein, 34 aa, Arabidopsis thaliana
RLRDHQSRIYVFLRSTRSSVSPSPSPSPFYLLSL

SEQ ID NO: 347 - DNA, 108 bp, Arabidopsis thaliana; identical to SEQ ID NO: 345
  source 1..108: mol_type = genomic DNA

SEQ ID NO: 348 - protein, 34 aa, Arabidopsis thaliana; identical to SEQ ID NO: 346

SEQ ID NO: 349 - DNA, 60 bp, Arabidopsis thaliana
  source 1..60: mol_type = genomic DNA
tgagcatactctgttttcatctcacctgttcaatggaatcaagactccgaatttatctaa

SEQ ID NO: 350 - protein, 18 aa, Arabidopsis thaliana
AYSVFISPVQWNQDSEFI

SEQ ID NO: 351 - DNA, 99 bp, Arabidopsis thaliana
  source 1..99: mol_type = genomic DNA
tagattatttttttcccgatcgatttcattgagcatactctgttttcatctcacctgttcaatggaatcaagactccgaatttatctaaagagtcttga

SEQ ID NO: 352 - protein, 31 aa, Arabidopsis thaliana
IIFFPIDFIEHTLFSSHLFNGIKTPNLSKES

SEQ ID NO: 353 - DNA, 288 bp, Arabidopsis thaliana
  source 1..288: mol_type = genomic DNA
tgactgatcaaagatgggaagtcaggagaatgtgaaacacctcgaggaatgcactgtttccaatgcattagggacatgggtattctcagtcctaggcgcattggttgcaatcccggtaggcatcaaacgcaagtctcttgggccactcgtgttctttggcacaaccggaacaatgctcgacatcatcattggtgtaagtcaatgcgagagagaacacgcagaacaccaaatgaagttactccaagactctcaaaatgccacaacaacaaccaccaacacagagactga

SEQ ID NO: 354 - protein, 94 aa, Arabidopsis thaliana
LIKDGKSGECETPRGMHCFQCIRDMGILSPRRIGCNPGRHQTQVSWATRVLWHNRNNARHHHWCKSMRERTRRTPNEVTPRLSKCHNNNHQHRD

SEQ ID NO: 355 - DNA, 51 bp, Arabidopsis thaliana
  source 1..51: mol_type = genomic DNA
tgaataatcctgcaaaagtgttcgatgattttctccagagaagaattttga

SEQ ID NO: 356 - protein, 15 aa, Arabidopsis thaliana
IILQKCSMIFSREEF

SEQ ID NO: 357 - DNA, 51 bp, Arabidopsis thaliana
  source 1..51: mol_type = genomic DNA
tgaattctgattctaataaatcatcttcaaatggatttgagaaatctttga

SEQ ID NO: 358 - protein, 15 aa, Arabidopsis thaliana
ILILINHLQMDLRNL

SEQ ID NO: 359 - DNA, 63 bp, Arabidopsis thaliana
  source 1..63: mol_type = genomic DNA
tagaagaaaactgatttcttggtttgtattttcttaaagagatcaatctttttttatttttga

SEQ ID NO: 360 - protein, 19 aa, Arabidopsis thaliana
KKTDFLVCIFLKRSIFFYF

SEQ ID NO: 361 - DNA, 291 bp, Arabidopsis thaliana
  source 1..291: mol_type = genomic DNA
tgagaatcaaatcggaaaggtagaagaatcgagtcggaaaaatggaaacgacgaagagtaacagcagcgagtccgatgtcaacgccaaatgggacgcttgtctcgatctcactgctcgtcgctttgtctactcttccctcggcggcgctttcgccggtcttctcttcttcaggagtccggttacgagatgggcgtcgattgcttttggtgctggaattggtattggttctgcatacacagattgttctcgtgtttttgatgcgtcttcttcaacttcagctactttattag

SEQ ID NO: 362 - protein, 95 aa, Arabidopsis thaliana
ESNRKGRRIESEKWKRRRVTAASPMSTPNGTLVSISLLVALSTLPSAALSPVFSSSGVRLRDGRRLLLVLELVLVLHTQIVLVFLMRLLQLQLLY

SEQ ID NO: 363 - DNA, 99 bp, Arabidopsis thaliana
  source 1..99: mol_type = genomic DNA
taaaagggcgagctttctcatcatccctctctctcaagactctgttttctcattcggttcttgcaaagaaggctggtacttccgttgcattggccttga

SEQ ID NO: 364 - protein, 31 aa, Arabidopsis thaliana
KGELSHHPSLSRLCFLIRFLQRRLVLPLHWP

SEQ ID NO: 365 - DNA, 159 bp, Arabidopsis thaliana
  source 1..159: mol_type = genomic DNA
tgaatggtggaaactaatctgattggtgataatcataggctcaccctttcaactaaaagggcgagctttctcatcatccctctctctcaagactctgttttctcattcggttcttgcaaagaaggctggtacttccgttgcattggccttgacccgtga

SEQ ID NO: 366 - protein, 51 aa, Arabidopsis thaliana
MVETNLIGDNHRLTLSTKRASFLIIPLSQDSVFSFGSCKEGWYFRCIGLDP

SEQ ID NO: 367 - DNA, 99 bp, Arabidopsis thaliana
  source 1..99: mol_type = genomic DNA
taggccagcatcgaatttggaaaaacatggctgtctcatggagtggagcaaaaaaaggagattacgttcttgatttgtgttgtggaagtggtgatttag

SEQ ID NO: 368 - protein, 31 aa, Arabidopsis thaliana
ASIEFGKTWLSHGVEQKKEITFLICVVEVVI

SEQ ID NO: 369 - DNA, 81 bp, Arabidopsis thaliana
  source 1..81: mol_type = genomic DNA
taagttttgagcttctggttggtttcaagtcctgtggagaaaaatgtcaccatttttgaagttctttctctttctctatga

SEQ ID NO: 370 - protein, 25 aa, Arabidopsis thaliana
VLSFWLVSSPVEKNVTIFEVLSLSL

SEQ ID NO: 371 - DNA, 96 bp, Arabidopsis thaliana
  source 1..96: mol_type = genomic DNA
taaactttgtattcatttccaagtatcactctaaatcatctttttcgaattcgcctcccaagatatgtcgacagagtcgtacgaagacgccattaa

SEQ ID NO: 372 - protein, 30 aa, Arabidopsis thaliana
TLYSFPSITLNHLFRIRLPRYVDRVVRRRH

SEQ ID NO: 373 - DNA, 273 bp, Arabidopsis thaliana
  source 1..273: mol_type = genomic DNA
taagaaaaaaccaaatccaaactaaagctatgcattttccacttgtttcggcttggaacaagagaaggagaagcaaatcatatgatacggatccatgggtctacagaacagcagaatgctggcaaatcgaagatcaggcttctcagccaaggaagcgaagattcgggtcatcagtttataccctcaaggagatggaggaggccacaagttctttcagtgatgagaatctcctcggtaaaggaggctttggccgagtttaccaaggcactttaa

SEQ ID NO: 374 - protein, 89 aa, Arabidopsis thaliana
EKTKSKLKLCIFHLFRLGTREGEANHMIRIHGSTEQQNAGKSKIRLLSQGSEDSGHQFIPSRRWRRPQVLSVMRISSVKEALAEFTKAL

SEQ ID NO: 375 - DNA, 54 bp, Arabidopsis thaliana
  source 1..54: mol_type = genomic DNA
taaagccgtggctcggatccttcgatcctctcttggacccaaaggaatggataa

SEQ ID NO: 376 - protein, 16 aa, Arabidopsis thaliana
SRGSDPSILSWTQRNG

SEQ ID NO: 377 - DNA, 111 bp, Arabidopsis thaliana
  source 1..111: mol_type = genomic DNA
taatcattacctctcttcgatttctcaaaccctatctggctctctacccatatgcttcagatccgcattaaaaaagctaagttttttgttatgtccttctttcttatttga

SEQ ID NO: 378 - protein, 35 aa, Arabidopsis thaliana
SLPLFDFSNPIWLSTHMLQIRIKKAKFFVMSFFLI

SEQ ID NO: 379 - DNA, 54 bp, Arabidopsis thaliana
  source 1..54: mol_type = genomic DNA
tagagattatctcagatccagccttttacccaattgaagacgttgaatcaatga

SEQ ID NO: 380 - protein, 16 aa, Arabidopsis thaliana
RLSQIQPFTQLKTLNQ

SEQ ID NO: 381 - DNA, 177 bp, Arabidopsis thaliana
  source 1..177: mol_type = genomic DNA
taagttttttgttatgtccttctttcttatttgatcagtttgttcttgtttcacgattttaacctgagattttttatatattttctccagatctgctatccgcagtcatctgttcataggaaaagatctggctttacttttagagattatctcagatccagccttttacccaattga

SEQ ID NO: 382 - protein, 57 aa, Arabidopsis thaliana
VFCYVLLSYLISLFLFHDFNLRFFIYFLQICYPQSSVHRKRSGFTFRDYLRSSLLPN

SEQ ID NO: 383 - DNA, 75 bp, Arabidopsis thaliana
  source 1..75: mol_type = genomic DNA
tgactttatgggttcttttgttttagatttaggctcctacagatctgcttaaatctctgtgatcttgtctcttaa

SEQ ID NO: 384 - protein, 23 aa, Arabidopsis thaliana
LYGFFCFRFRLLQICLNLCDLVS

SEQ ID NO: 385 - DNA, 168 bp, Arabidopsis thaliana
  source 1..168: mol_type = genomic DNA
taaagtaaaatcaagaaaaagctcctgagtactactggaaacaaaaaagcagagaacaagagaaaaaaaaaagaagaagacgactttatctttttctgggttttgttgttcttctttgactttatgggttcttttgttttagatttaggctcctacagatctgcttaa

SEQ ID NO: 386 - protein, 54 aa, Arabidopsis thaliana
SKIKKKLLSTTGNKKAENKRKKKEEDDFIFFWVLLFFFDFMGSFVLDLGSYRSA

SEQ ID NO: 387 - DNA, 75 bp, Arabidopsis thaliana; identical to SEQ ID NO: 383
  source 1..75: mol_type = genomic DNA

SEQ ID NO: 388 - protein, 23 aa, Arabidopsis thaliana
LYGFFCFRFRLLQICLNLCDLVS

SEQ ID NO: 389 - DNA, 168 bp, Arabidopsis thaliana; identical to SEQ ID NO: 385
  source 1..168: mol_type = genomic DNA

SEQ ID NO: 390 - protein, 54 aa, Arabidopsis thaliana; identical to SEQ ID NO: 386

SEQ ID NO: 391 - DNA, 168 bp, Arabidopsis thaliana; identical to SEQ ID NO: 385
  source 1..168: mol_type = genomic DNA

SEQ ID NO: 392 - protein, 54 aa, Arabidopsis thaliana; identical to SEQ ID NO: 386

SEQ ID NO: 393 - DNA, 75 bp, Arabidopsis thaliana; identical to SEQ ID NO: 383
  source 1..75: mol_type = genomic DNA

SEQ ID NO: 394 - protein, 23 aa, Arabidopsis thaliana
LYGFFCFRFRLLQICLNLCDLVS

SEQ ID NO: 395 - DNA, 165 bp, Arabidopsis thaliana
  source 1..165: mol_type = genomic DNA
tgagaaattgaagtaaatgttggcagcaagacaagcttgaacttggcgatagctcgaatgaaattgctgcaaaacaagagagatatgcagcttaaacatatgaagaaggagatagctcacttcttgcaagctggacaagaacccattgctcgaattcgggtttga

SEQ ID NO: 396 - protein, 53 aa, Arabidopsis thaliana
EIEVNVGSKTSLNLAIARMKLLQNKRDMQLKHMKKEIAHFLQAGQEPIARIRV

SEQ ID NO: 397 - DNA, 84 bp, Arabidopsis thaliana
  source 1..84: mol_type = genomic DNA
taaacatatgaagaaggagatagctcacttcttgcaagctggacaagaacccattgctcgaattcgggtttgatctcattctga

SEQ ID NO: 398 - protein, 26 aa, Arabidopsis thaliana
TYEEGDSSLLASWTRTHCSNSGLISF

SEQ ID NO: 399 - DNA, 78 bp, Arabidopsis thaliana
  source 1..78: mol_type = genomic DNA
taagacttaaaaggacttgttctggtgttgaagtatttgggggttttcacgaaaagcaaaaaataccctttttcatag

SEQ ID NO: 400 - protein, 24 aa, Arabidopsis thaliana
DLKGLVLVLKYLGVFTKSKKYPFS

SEQ ID NO: 401 - DNA, 78 bp, Arabidopsis thaliana; identical to SEQ ID NO: 399
  source 1..78: mol_type = genomic DNA

SEQ ID NO: 402 - protein, 24 aa, Arabidopsis thaliana
DLKGLVLVLKYLGVFTKSKKYPFS

SEQ ID NO: 403 - DNA, 66 bp, Arabidopsis thaliana
  source 1..66: mol_type = genomic DNA
tgactattctccctcacttctctctctctcaactcttgtgatatttattcaaagatgcttccatga

SEQ ID NO: 404 - protein, 20 aa, Arabidopsis thaliana
LFSLTSLSLNSCDIYSKMLP

SEQ ID NO: 405 - DNA, 84 bp, Arabidopsis thaliana
  source 1..84: mol_type = genomic DNA
tgattacgcctccatctcctccggcgaccagagtcttcagcggagtcgaaggagtggagatggaaaccgagccgttgtgcgtga

SEQ ID NO: 406 - protein, 26 aa, Arabidopsis thaliana
LRLHLLRRPESSAESKEWRWKPSRCA

SEQ ID NO: 407 - DNA, 84 bp, Arabidopsis thaliana
  source 1..84: mol_type = genomic DNA
taagtgacggtgtttgttcaatttcagtttttgatcagaagagtgttggtgaagaagatgttagaatctggtcttgggatttag

SEQ ID NO: 408 - protein, 26 aa, Arabidopsis thaliana
VTVFVQFQFLIRRVLVKKMLESGLGI

SEQ ID NO: 409 - DNA, 192 bp, Arabidopsis thaliana
  source 1..192: mol_type = genomic DNA
tagttggtgcttggaggttactgtcatactcaagtctgggaatttttgtttcttttttgtttaataatttctcttagtaaagtaagtgacggtgtttgttcaatttcagtttttgatcagaagagtgttggtgaagaagatgttagaatctggtcttgggatttagatgactacacctgcacaggctcctag

SEQ ID NO: 410 - protein, 62 aa, Arabidopsis thaliana
LVLGGYCHTQVWEFLFLFCLIISLSKVSDGVCSISVFDQKSVGEEDVRIWSWDLDDYTCTGS

SEQ ID NO: 411 - DNA, 234 bp, Arabidopsis thaliana
  source 1..234: mol_type = genomic DNA
tagccccttgcatctttgagatttatagatgcaaggaacaaatcgagaaaaaggtactcaattggtgctatattttggctttttacgcttcttttgttgggttgttcaatagttgagcttctcagaaatgtgtattggccaatagctgaaatctgggtattgagtggtgttagtttgtttaattttgtattgaaaggaaaacagagcatgatgatgagaaaaatgtgccactga

SEQ ID NO: 412 - protein, 76 aa, Arabidopsis thaliana
PLASLRFIDARNKSRKRYSIGAIFWLFTLLLLGCSIVELLRNVYWPIAEIWVLSGVSLFNFVLKGKQSMMMRKMCH

SEQ ID NO: 413 - DNA, 87 bp, Arabidopsis thaliana
  source 1..87: mol_type = genomic DNA
tagatgcaaggaacaaatcgagaaaaaggtactcaattggtgctatattttggctttttacgcttcttttgttgggttgttcaatag

SEQ ID NO: 414 - protein, 27 aa, Arabidopsis thaliana
MQGTNREKGTQLVLYFGFLRFFCWVVQ

SEQ ID NO: 415 - DNA, 132 bp, Arabidopsis thaliana
  source 1..132: mol_type = genomic DNA
taattaaagcactgtatagccccttgcatctttgagatttatagatgcaaggaacaaatcgagaaaaaggtactcaattggtgctatattttggctttttacgcttcttttgttgggttgttcaatagttga

SEQ ID NO: 416 - protein, 42 aa, Arabidopsis thaliana
LKHCIAPCIFEIYRCKEQIEKKVLNWCYILAFYASFVGLFNS

SEQ ID NO: 417 - DNA, 54 bp, Arabidopsis thaliana
  source 1..54: mol_type = genomic DNA
tgaatgataaaactcaactgttttctcaatcctgaaattatggccgaaaactag

SEQ ID NO: 418 - protein, 16 aa, Arabidopsis thaliana
MIKLNCFLNPEIMAEN

SEQ ID NO: 419 - DNA, 192 bp, Arabidopsis thaliana
  source 1..192: mol_type = genomic DNA
taaaaaaaaccttataaccttagaaggagcagagagaaatggagactaaagggccaaaaaatgctctctttcaaaacaaaagacaacgagagaactttagttcttgctcttctctcagatgcaagaatcgagcagaggagactaagaatttgtttgttaaaaattagggttttgagtcgtttgacattttaa

SEQ ID NO: 420 - protein, 62 aa, Arabidopsis thaliana
KKPYNLRRSREKWRLKGQKMLSFKTKDNERTLVLALLSDARIEQRRLRICLLKIRVLSRLTF

SEQ ID NO: 421 - DNA, 165 bp, Arabidopsis thaliana
  source 1..165: mol_type = genomic DNA
taacagacacaccaactgaaacagtatcgcttgatgagtgaacctttccgacagaaacatccggatggatttgaacagccatcggtggttcttcatcatcatcttccattttcactccctcagcttcttccttcagcatcgccggtatatgcagagacgccgtaa

SEQ ID NO: 422 - protein, 53 aa, Arabidopsis thaliana
QTHQLKQYRLMSEPFRQKHPDGFEQPSVVLHHHLPFSLPQLLPSASPVYAETP

SEQ ID NO: 423 - DNA, 153 bp, Arabidopsis thaliana
  source 1..153: mol_type = genomic DNA
taaggttataaggttttttttagtctttggttaaacgatgggaaggacaaagaaacctcaaaagtttgcagtaatgaagatgatgataagccacaaagctttgaaacattacaaggaggaggttctgaatccaaacaagaaggacctcactga

SEQ ID NO: 424 - protein, 49 aa, Arabidopsis thaliana
GYKVFFSLWLNDGKDKETSKVCSNEDDDKPQSFETLQGGGSESKQEGPH

SEQ ID NO: 425 - DNA, 63 bp, Arabidopsis thaliana
  source 1..63: mol_type = genomic DNA
taatggaggagggacgtcaaaaagacttgcaattgttggaggagattatcgacaaaggtttga

SEQ ID NO: 426 - protein, 19 aa, Arabidopsis thaliana
WRRDVKKTCNCWRRLSTKV

SEQ ID NO: 427 - DNA, 114 bp, Arabidopsis thaliana
  source 1..114: mol_type = genomic DNA
taaaaagggcaaattagagagatttctccttcaataacaaaaaatcgccagctttatctctctctttttcacatcccatggctagatggtgacgacgattcacgcataaactag

SEQ ID NO: 428 - protein, 36 aa, Arabidopsis thaliana
KGQIREISPSITKNRQLYLSLFHIPWLDGDDDSRIN

SEQ ID NO: 429 - DNA, 78 bp, Arabidopsis thaliana
  source 1..78: mol_type = genomic DNA
tagagagatttctccttcaataacaaaaaatcgccagctttatctctctctttttcacatcccatggctagatggtga

SEQ ID NO: 430 - protein, 24 aa, Arabidopsis thaliana
RDFSFNNKKSPALSLSFSHPMARW

SEQ ID NO: 431 - DNA, 78 bp, Arabidopsis thaliana; identical to SEQ ID NO: 429
  source 1..78: mol_type = genomic DNA

SEQ ID NO: 432 - protein, 24 aa, Arabidopsis thaliana
RDFSFNNKKSPALSLSFSHPMARW

SEQ ID NO: 433 - DNA, 114 bp, Arabidopsis thaliana; identical to SEQ ID NO: 427
  source 1..114: mol_type = genomic DNA

SEQ ID NO: 434 - protein, 36 aa, Arabidopsis thaliana; identical to SEQ ID NO: 428

SEQ ID NO: 435 - DNA, 114 bp, Arabidopsis thaliana; identical to SEQ ID NO: 427
  source 1..114: mol_type = genomic DNA

SEQ ID NO: 436 - protein, 36 aa, Arabidopsis thaliana; identical to SEQ ID NO: 428

SEQ ID NO: 437 - DNA, 78 bp, Arabidopsis thaliana; identical to SEQ ID NO: 429
  source 1..78: mol_type = genomic DNA

SEQ ID NO: 438 - protein, 24 aa, Arabidopsis thaliana
RDFSFNNKKSPALSLSFSHPMARW

SEQ ID NO: 439 - DNA, 84 bp, Arabidopsis thaliana
  source 1..84: mol_type = genomic DNA
taaagtcatttcctatcaaatctcttttcatggcggctgctattctcgtttctcctgttcgctaaattgcgtcattttcattga

SEQ ID NO: 440 - protein, 26 aa, Arabidopsis thaliana
SHFLSNLFSWRLLFSFLLFAKLRHFH

SEQ ID NO: 441 - DNA, 102 bp, Arabidopsis thaliana
  source 1..102: mol_type = genomic DNA
tagcttactacactactccaagaagaaaatctcaagttaaagtcatttcctatcaaatctcttttcatggcggctgctattctcgtttctcctgttcgctaa

SEQ ID NO: 442 - protein, 32 aa, Arabidopsis thaliana
LTTLLQEENLKLKSFPIKSLFMAAAILVSPVR

SEQ ID NO: 443 - DNA, 54 bp, Arabidopsis thaliana
  source 1..54: mol_type = genomic DNA
tagttttcgtgcttcttcgatttcttcttcttcagttgtttcccatcgtcgtaa

SEQ ID NO: 444 - protein, 16 aa, Arabidopsis thaliana
FSCFFDFFFFSCFPSS

SEQ ID NO: 445 - DNA, 213 bp, Arabidopsis thaliana
  source 1..213: mol_type = genomic DNA
tgaaaactcttttctctccacctctttctctcttaccccaaacacaaaatctcctctttaatggatatatcgcctctccgatctcattcttcctcgtttttatctgccaaactcttattgctcttcttcttttgtagttttcgtgcttcttcgatttcttcttcttcagttgtttcccatcgtcgtaatccttctagctttcggtttctttga

SEQ ID NO: 446 - protein, 69 aa, Arabidopsis thaliana
KLFSLHLFLSYPKHKISSLMDISPLRSHSSSFLSAKLLLLFFFCSFRASSISSSSVVSHRRNPSSFRFL

SEQ ID NO: 447 - DNA, 168 bp, Arabidopsis thaliana
  source 1..168: mol_type = genomic DNA
taatggatatatcgcctctccgatctcattcttcctcgtttttatctgccaaactcttattgctcttcttcttttgtagttttcgtgcttcttcgatttcttcttcttcagttgtttcccatcgtcgtaatccttctagctttcggtttctttgataattccctttga

SEQ ID NO: 448 - protein, 54 aa, Arabidopsis thaliana
WIYRLSDLILPRFYLPNSYCSSSFVVFVLLRFLLLQLFPIVVILLAFGFFDNSL

SEQ ID NO: 449 - DNA, 213 bp, Arabidopsis thaliana; identical to SEQ ID NO: 445
  source 1..213: mol_type = genomic DNA

SEQ ID NO: 450 - protein, 69 aa, Arabidopsis thaliana; identical to SEQ ID NO: 446

SEQ ID NO: 451 - DNA, 213 bp, Arabidopsis thaliana; identical to SEQ ID NO: 445
  source 1..213: mol_type = genomic DNA

SEQ ID NO: 452 - protein, 69 aa, Arabidopsis thaliana; identical to SEQ ID NO: 446

SEQ ID NO: 453 - DNA, 168 bp, Arabidopsis thaliana; identical to SEQ ID NO: 447
  source 1..168: mol_type = genomic DNA

SEQ ID NO: 454 - protein, 54 aa, Arabidopsis thaliana; identical to SEQ ID NO: 448

SEQ ID NO: 455 - DNA, 198 bp, Arabidopsis thaliana
  source 1..198: mol_type = genomic DNA
tgatatccacgaaaatcagaagacgagatgctaggagaatgtgggaggctatcaaagacagagaaaccggtcgaattcgttccaattccttcgccaatcgattcaaatcccgccggattttgtctctccaactctctaatcgaaaagactttgtttctcctcatcgtggctccgttaactcccttcaggttgatttga

SEQ ID NO: 456 - protein, 64 aa, Arabidopsis thaliana
YPRKSEDEMLGECGRLSKTEKPVEFVPIPSPIDSNPAGFCLSNSLIEKTLFLLIVAPLTPFRLI

SEQ ID NO: 457 - DNA, 198 bp, Arabidopsis thaliana; identical to SEQ ID NO: 455
  source 1..198: mol_type = genomic DNA

SEQ ID NO: 458 - protein, 64 aa, Arabidopsis thaliana; identical to SEQ ID NO: 456

SEQ ID NO: 459 - DNA, 66 bp, Arabidopsis thaliana
  source 1..66: mol_type = genomic DNA
tgaggagagaggagaaattggaaatggaatcgatctcacttgggtctctgctcttttgatctgtag

SEQ ID NO: 460 - protein, 20 aa, Arabidopsis thaliana
GERRNWKWNRSHLGLCSFDL

SEQ ID NO: 461 - DNA, 84 bp, Arabidopsis thaliana
  source 1..84: mol_type = genomic DNA
taagctttcttcaatggcgtatggttctttcggcgtctcatcaaaagctctagtctattgccgtccctgctatggctccattag

SEQ ID NO: 462 - protein, 26 aa, Arabidopsis thaliana
AFFNGVWFFRRLIKSSSLLPSLLWLH

SEQ ID NO: 463 - DNA, 174 bp, Arabidopsis thaliana
  source 1..174: mol_type = genomic DNA
taatgtcgtgatatgttcaataagctttcttcaatggcgtatggttctttcggcgtctcatcaaaagctctagtctattgccgtccctgctatggctccattagagatctccctttctccctccgaacgtcaacagtttcgtctcccgctcttttccgctttgaaactctatga

SEQ ID NO: 464 - protein, 56 aa, Arabidopsis thaliana
CRDMFNKLSSMAYGSFGVSSKALVYCRPCYGSIRDLPFSLRTSTVSSPALFRFETL

SEQ ID NO: 465 - DNA, 63 bp, Arabidopsis thaliana
  source 1..63: mol_type = genomic DNA
tagagatctccctttctccctccgaacgtcaacagtttcgtctcccgctcttttccgctttga

SEQ ID NO: 466 - protein, 19 aa, Arabidopsis thaliana
RSPFLPPNVNSFVSRSFPL

SEQ ID NO: 467 - DNA, 126 bp, Arabidopsis thaliana
  source 1..126: mol_type = genomic DNA
tgaaccagattggctaccgaattcaatttttctattggggctataggtgttctcccggggaaaataaccaatggagttgattacgttgctcctcgcagttctccctttaacaccaacggtagatag

SEQ ID NO: 468 - protein, 40 aa, Arabidopsis thaliana
TRLATEFNFSIGAIGVLPGKITNGVDYVAPRSSPFNTNGR

SEQ ID NO: 469 - DNA, 75 bp, Arabidopsis thaliana
  source 1..75: mol_type = genomic DNA
taattgccacagtgttctggtcctgaatctttgcttatgccatcaatgaaatgctcatcttcttcctgtttatga

SEQ ID NO: 470 - protein, 23 aa, Arabidopsis thaliana
LPQCSGPESLLMPSMKCSSSSCL

SEQ ID NO: 471 - DNA, 51 bp, Arabidopsis thaliana
  source 1..51: mol_type = genomic DNA
tgaaatgctcatcttcttcctgtttatgagaaaattctgaatctctgttag

SEQ ID NO: 472 - protein, 15 aa, Arabidopsis thaliana
NAHLLPVYEKILNLC

SEQ ID NO: 473 - DNA, 63 bp, Arabidopsis thaliana
  source 1..63: mol_type = genomic DNA
tgaatctttgcttatgccatcaatgaaatgctcatcttcttcctgtttatgagaaaattctga

SEQ ID NO: 474 - protein, 19 aa, Arabidopsis thaliana
IFAYAINEMLIFFLFMRKF

SEQ ID NO: 475 - DNA, 78 bp, Arabidopsis thaliana
  source 1..78: mol_type = genomic DNA
tgacaacttcagagaccttatatcagatttcaaatcttcttcttcttctccgcgacgacgacgagcttcttcgattga

SEQ ID NO: 476 - protein, 24 aa, Arabidopsis thaliana
QLQRPYIRFQIFFFFSATTTSFFD

SEQ ID NO: 477 - DNA, 234 bp, Arabidopsis thaliana
  source 1..234: mol_type = genomic DNA
tgagctcggaaactaagtgccgggagttcaaatcgatcatcagtttcggagattccattgccgacactggaaacttgcttggcctctcagatcctaaagatcttcctcacatggcgtttccaccgtatggagagaacttcttccaccacccaactggtcgtttctccaacggccgcctcatcattgatttcatcggtacttttgactttacagttttacttaaggtgtgagtaa

SEQ ID NO: 478 - protein, 76 aa, Arabidopsis thaliana
ARKLSAGSSNRSSVSEIPLPTLETCLASQILKIFLTWRFHRMERTSSTTQLVVSPTAASSLISSVLLTLQFYLRCE

SEQ ID NO: 479 - DNA, 93 bp, Arabidopsis thaliana
  source 1..93: mol_type = genomic DNA
taaagatcttcctcacatggcgtttccaccgtatggagagaacttcttccaccacccaactggtcgtttctccaacggccgcctcatcattga

SEQ ID NO: 480 - protein, 29 aa, Arabidopsis thaliana
RSSSHGVSTVWRELLPPPNWSFLQRPPHH

SEQ ID NO: 481 - DNA, 78 bp, Arabidopsis thaliana
  source 1..78: mol_type = genomic DNA
taaaaaaagaagtcaaaggggcattccgagaatcgaactcgggacctcttgcacccaaagcgagaatcataccactag

SEQ ID NO: 482 - protein, 24 aa, Arabidopsis thaliana
KKKSKGHSENRTRDLLHPKRESYH

SEQ ID NO: 483 - DNA, 78 bp, Arabidopsis thaliana; identical to SEQ ID NO: 481
  source 1..78: mol_type = genomic DNA

SEQ ID NO: 484 - protein, 24 aa, Arabidopsis thaliana
KKKSKGHSENRTRDLLHPKRESYH

SEQ ID NO: 485 - DNA, 168 bp, Arabidopsis thaliana
  source 1..168: mol_type = genomic DNA
taaacatgccttccttcaactcctccggcaatctcgcggtggccgttgctcttctctttgcgggcgccttatatttctatttctcatcaattacggtttctgatcctatgtccgatctactacacaatgtcgaaactagatggacagagtatcctgtggacgagctag

SEQ ID NO: 486 - protein, 54 aa, Arabidopsis thaliana
TCLPSTPPAISRWPLLFSLRAPYISISHQLRFLILCPIYYTMSKLDGQSILWTS

SEQ ID NO: 487 - DNA, 126 bp, Arabidopsis thaliana
  source 1..126: mol_type = genomic DNA
tagattggtcatgtacttaaaaaaagaagtcaaaggggcattccgagaatcgaactcgggacctcttgcacccaaagcgagaatcataccactagaccaaatgctgtatttgaatgcccccactga

SEQ ID NO: 488 - protein, 40 aa, Arabidopsis thaliana
IGHVLKKRSQRGIPRIELGTSCTQSENHTTRPNAVFECPH

SEQ ID NO: 489 - DNA, 54 bp, Arabidopsis thaliana
  source 1..54: mol_type = genomic DNA
tagagagagttattatgtttgattctgaagcgtgacgtcactcagaaaccgtga

SEQ ID NO: 490 - protein, 16 aa, Arabidopsis thaliana
RELLCLILKRDVTQKP

SEQ ID NO: 491 - DNA, 84 bp, Arabidopsis thaliana
  source 1..84: mol_type = genomic DNA
tgaatggaagagatagagaggagcatgggtctctgtgaagaagataacgtagagagagttattatgtttgattctgaagcgtga

SEQ ID NO: 492 - protein, 26 aa, Arabidopsis thaliana
MEEIERSMGLCEEDNVERVIMFDSEA

SEQ ID NO: 493 - DNA, 54 bp, Arabidopsis thaliana; identical to SEQ ID NO: 489
  source 1..54: mol_type = genomic DNA

SEQ ID NO: 494 - protein, 16 aa, Arabidopsis thaliana
RELLCLILKRDVTQKP

SEQ ID NO: 495 - DNA, 84 bp, Arabidopsis thaliana; identical to SEQ ID NO: 491
  source 1..84: mol_type = genomic DNA

SEQ ID NO: 496 - protein, 26 aa, Arabidopsis thaliana
MEEIERSMGLCEEDNVERVIMFDSEA

SEQ ID NO: 497 - DNA, 84 bp, Arabidopsis thaliana; identical to SEQ ID NO: 491
  source 1..84: mol_type = genomic DNA

SEQ ID NO: 498 - protein, 26 aa, Arabidopsis thaliana
MEEIERSMGLCEEDNVERVIMFDSEA

SEQ ID NO: 499 - DNA, 54 bp, Arabidopsis thaliana; identical to SEQ ID NO: 489
  source 1..54: mol_type = genomic DNA

SEQ ID NO: 500 - protein, 16 aa, Arabidopsis thaliana
RELLCLILKRDVTQKP

SEQ ID NO: 501 - DNA, 54 bp, Arabidopsis thaliana; identical to SEQ ID NO: 489
  source 1..54: mol_type = genomic DNA

SEQ ID NO: 502 - protein, 16 aa, Arabidopsis thaliana
RELLCLILKRDVTQKP

SEQ ID NO: 503 - DNA, 84 bp, Arabidopsis thaliana; identical to SEQ ID NO: 491
  source 1..84: mol_type = genomic DNA

SEQ ID NO: 504 - protein, 26 aa, Arabidopsis thaliana
MEEIERSMGLCEEDNVERVIMFDSEA

SEQ ID NO: 505 - DNA, 51 bp, Arabidopsis thaliana
  source 1..51: mol_type = genomic DNA
taaactccggcctcgtccttcaaatatctccggtctaggtcacagtactag

SEQ ID NO: 506 - protein, 15 aa, Arabidopsis thaliana
TPASSFKYLRSRSQY

SEQ ID NO: 507 - DNA, 150 bp, Arabidopsis thaliana
  source 1..150: mol_type = genomic DNA
tgacggagtgatctttccaccaccgtaactaatcttaacaattcatggcgagtctctgtctctcatcgtcccggatcgtttctcttcaccaccagaaaccctttctcgctcttaaactccggcctcgtccttcaaatatctccggtctag

SEQ ID NO: 508 - protein, 48 aa, Arabidopsis thaliana
RSDLSTTVTNLNNSWRVSVSHRPGSFLFTTRNPFSLLNSGLVLQISPV

SEQ ID NO: 509 - DNA, 63 bp, Arabidopsis thaliana
  source 1..63: mol_type = genomic DNA
taaggaattgtcgccccaggcttaatctgcatccattacgatggttgtaacatgttcatgtaa

SEQ ID NO: 510 - protein, 19 aa, Arabidopsis thaliana
GIVAPGLICIHYDGCNMFM

SEQ ID NO: 511 - DNA, 63 bp, Arabidopsis thaliana
  source 1..63: mol_type = genomic DNA
taatctgcatccattacgatggttgtaacatgttcatgtaagcgtggttacttcagaaagtga

SEQ ID NO: 512 - protein, 19 aa, Arabidopsis thaliana
SASITMVVTCSCKRGYFRK

SEQ ID NO: 513 - DNA, 75 bp, Arabidopsis thaliana
  source 1..75: mol_type = genomic DNA
tagctcagattgaggaaagtgatgataaggaattgtcgccccaggcttaatctgcatccattacgatggttgtaa

SEQ ID NO: 514 - protein, 23 aa, Arabidopsis thaliana
LRLRKVMIRNCRPRLNLHPLRWL

SEQ ID NO: 515 - DNA, 69 bp, Arabidopsis thaliana
  source 1..69: mol_type = genomic DNA
taatggaaggaggtcttccaagatctgcctcttcaaagttttatagctcaccaatcaaaacaaatttga

SEQ ID NO: 516 - protein, 21 aa, Arabidopsis thaliana
WKEVFQDLPLQSFIAHQSKQI

SEQ ID NO: 517 - DNA, 309 bp, Arabidopsis thaliana
  source 1..309: mol_type = genomic DNA
tgaatctctgggtattcctttatggatccagtagatatggttgtgtcacagccaattacgcctggtcaggtttcgtttctgcttggagtcattcctcttatgatagcatggctatactcggaatttctggagtataggaggtcttcttttcacgctaaagttcattcagataagaatttggttgaactggaaatggtgacgaacaaagaggatgaaggaacagttttaatggaaggaggtcttccaagatctgcctcttcaaagttttatagctcaccaatcaaaacaaatttgattaggttgttatag

SEQ ID NO: 518 - protein, 101 aa, Arabidopsis thaliana
ISGYSFMDPVDMVVSQPITPGQVSFLLGVIPLMIAWLYSEFLEYRRSSFHAKVHSDKNLVELEMVTNKEDEGTVLMEGGLPRSASSKFYSSPIKTNLIRLL

SEQ ID NO: 519 - DNA, 60 bp, Arabidopsis thaliana
  source 1..60: mol_type = genomic DNA
tgaaggaacagttttaatggaaggaggtcttccaagatctgcctcttcaaagttttatag

SEQ ID NO: 520 - protein, 18 aa, Arabidopsis thaliana
RNSFNGRRSSKICLFKVL

SEQ ID NO: 521 - DNA, 117 bp, Arabidopsis thaliana
  source 1..117: mol_type = genomic DNA
tgatattggaagaaccaaagatgccctggacagcattcttcatgtttttcaacagaacttgcactcgtctggttgtctttttcctcgttattctgtaattttgttcctttcaggtga

SEQ ID NO: 522 - protein, 37 aa, Arabidopsis thaliana
YWKNQRCPGQHSSCFSTELALVWLSFSSLFCNFVPFR

SEQ ID NO: 523 - DNA, 204 bp, Arabidopsis thaliana
  source 1..204: mol_type = genomic DNA
taaagctttagtttttacgcatcaccgattcatttgatccaaagggtttttgatttcttctacgagtttgtgagaagaggaacggtatttaatacacttacaaatttgatattggaagaaccaaagatgccctggacagcattcttcatgtttttcaacagaacttgcactcgtctggttgtctttttcctcgttattctgtaa

SEQ ID NO: 524 - protein, 66 aa, Arabidopsis thaliana
SFSFYASPIHLIQRVFDFFYEFVRRGTVFNTLTNLILEEPKMPWTAFFMFFNRTCTRLVVFFLVIL

SEQ ID NO: 525 - DNA, 108 bp, Arabidopsis thaliana
  source 1..108: mol_type = genomic DNA
taaagagtctggtattctgaagagctgtctgtgggggagcttctggtttggggggtaagggctctggtggaaactcgtgatatctttagtatgatggccataacttga

SEQ ID NO: 526 - protein, 34 aa, Arabidopsis thaliana
RVWYSEELSVGELLVWGVRALVETRDIFSMMAIT

SEQ ID NO: 527 - DNA, 81 bp, Arabidopsis thaliana
  source 1..81: mol_type = genomic DNA
tgactacatgtttcattgctaattaccaatccgttcaagtttgccaggctgaatatttcagacagttgcttaagcctgtaa

SEQ ID NO: 528 - protein, 25 aa, Arabidopsis thaliana
LHVSLLITNPFKFARLNISDSCLSL

SEQ ID NO: 529 - DNA, 159 bp, Arabidopsis thaliana
  source 1..159: mol_type = genomic DNA
tagtttgtgagaatgtgcattgttggaaacaagaagggaaaccgatcattgaaggaaataggaacttttatgatgactacatgtttcattgctaattaccaatccgttcaagtttgccaggctgaatatttcagacagttgcttaagcctgtaacgtag

SEQ ID NO: 530 - protein, 51 aa, Arabidopsis thaliana
FVRMCIVGNKKGNRSLKEIGTFMMTTCFIANYQSVQVCQAEYFRQLLKPVT

SEQ ID NO: 531 - DNA, 159 bp, Arabidopsis thaliana; identical to SEQ ID NO: 529
  source 1..159: mol_type = genomic DNA

SEQ ID NO: 532 - protein, 51 aa, Arabidopsis thaliana; identical to SEQ ID NO: 530

SEQ ID NO: 533 - DNA, 108 bp, Arabidopsis thaliana; identical to SEQ ID NO: 525
  source 1..108: mol_type = genomic DNA

SEQ ID NO: 534 - protein, 34 aa, Arabidopsis thaliana; identical to SEQ ID NO: 526

SEQ ID NO: 535 - DNA, 279 bp, Arabidopsis thaliana
  source 1..279: mol_type = genomic DNA
tgatcctatctttttgtttgttgtacgcagatgcctaaagttgtgcttttttattatctgaatcaggaattagaaatttcccatttttttgtttctctgttttgttttgccagtagttattttaggattctacctcgaaagtttgtgagaagaggaacggtatttaatacacttacaaatttgatattggaagaaccaaagatgccctggacagcattcttcatgtttttcaacagaacttgcactcgtctggttgtctttttcctcgttattctgtaa

SEQ ID NO: 536 - protein, 91 aa, Arabidopsis thaliana
SYLFVCCTQMPKVVLFYYLNQELEISHFFVSLFCFASSYFRILPRKFVRRGTVFNTLTNLILEEPKMPWTAFFMFFNRTCTRLVVFFLVIL

SEQ ID NO: 537 - DNA, 81 bp, Arabidopsis thaliana; identical to SEQ ID NO: 527
  source 1..81: mol_type = genomic DNA

SEQ ID NO: 538 - protein, 25 aa, Arabidopsis thaliana
LHVSLLITNPFKFARLNISDSCLSL

SEQ ID NO: 539 - DNA, 264 bp, Arabidopsis thaliana
  source 1..264: mol_type = genomic DNA
tgatcctatctttttgtttgttgtacgcagatgcctaaagttgtgcttttttattatctgaatcaggaattagaaatttcccatttttttgtttctctgttttgttttgccagtagttattttaggattctacctcgaagaacggtatttaatacacttacaaatttgatattggaagaaccaaagatgccctggacagcattcttcatgtttttcaacagaacttgcactcgtctggttgtctttttcctcgttattctgtaa

SEQ ID NO: 540 - protein, 86 aa, Arabidopsis thaliana
SYLFVCCTQMPKVVLFYYLNQELEISHFFVSLFCFASSYFRILPRRTVFNTLTNLILEEPKMPWTAFFMFFNRTCTRLVVFFLVIL

SEQ ID NO: 541 - DNA, 99 bp, Arabidopsis thaliana
  source 1..99: mol_type = genomic DNA
tgatataactattattgcagatctgtggatcttaacacttctctaatgcttataatgacgagatctaagcatgagaaggaagagataagaagctcatga

SEQ ID NO: 542 - protein, 31 aa, Arabidopsis thaliana
YNYYCRSVDLNTSLMLIMTRSKHEKEEIRSS

SEQ ID NO: 543 - DNA, 141 bp, Arabidopsis thaliana
  source 1..141: mol_type = genomic DNA
tgaattttgattttcggctgtttatatggtctccggtcccttagggttttaattcttctgcagatctctcacgatgagcgttgcgaaatcccaagtatggcagccatgcaagaagaagaggtcctcctcctgattcaatag

SEQ ID NO: 544 - protein, 45 aa, Arabidopsis thaliana
ILIFGCLYGLRSLRVLILLQISHDERCEIPSMAAMQEEEVLLLIQ

SEQ ID NO: 545 - DNA, 84 bp, Arabidopsis thaliana
  source 1..84: mol_type = genomic DNA
taattcttctgcagatctctcacgatgagcgttgcgaaatcccaagtatggcagccatgcaagaagaagaggtcctcctcctga

SEQ ID NO: 546 - protein, 26 aa, Arabidopsis thaliana
FFCRSLTMSVAKSQVWQPCKKKRSSS

SEQ ID NO: 547 - DNA, 84 bp, Arabidopsis thaliana
  source 1..84: mol_type = genomic DNA
tgaatgggtgggaggtggagggaaacagttaaaaaagttatgcttttagtgtctcttcttcataattacatttgggcatcttga

SEQ ID NO: 548 - protein, 26 aa, Arabidopsis thaliana
MGGRWRETVKKVMLLVSLLHNYIWAS

SEQ ID NO: 549 - DNA, 135 bp, Arabidopsis thaliana
  source 1..135: mol_type = genomic DNA
tagaaggggaagaagatgttcttctcatcacgaaaagtcagcgtctctctcttcatcatcaacctttcttcttcttcttctcaatcttttctcaagaaaatcacaaatttcccaagaaaacactcacatatatga

SEQ ID NO: 550 - protein, 43 aa, Arabidopsis thaliana
KGKKMFFSSRKVSVSLFIINLSSSSSQSFLKKITNFPRKHSHI

SEQ ID NO: 551 - DNA, 144 bp, Arabidopsis thaliana
  source 1..144: mol_type = genomic DNA
taaacaagaaagaaaaaccattcttctctcttttcgtttttttcattctctctctctctactccatcgttttcacacttttctcgccgccctttatccttatccgataaacccacaaataaagacagactcttttgttctttaa

SEQ ID NO: 552 - protein, 46 aa, Arabidopsis thaliana
TRKKNHSSLFSFFSFSLSLLHRFHTFLAALYPYPINPQIKTDSFVL

SEQ ID NO: 553 - DNA, 114 bp, Arabidopsis thaliana
  source 1..114: mol_type = genomic DNA
taaagtcttctcctttgcgtgcatttcttcaattttcagattcttcctaaggtacccttctcaaaattcttccttgttttgcgattcttcatcggttcaatggatcctctttga

SEQ ID NO: 554 - protein, 36 aa, Arabidopsis thaliana
SLLLCVHFFNFQILPKVPFSKFFLVLRFFIGSMDPL

SEQ ID NO: 555 - DNA, 159 bp, Arabidopsis thaliana
  source 1..159: mol_type = genomic DNA
tagtgtctgactcaatcgtttgcatcggaagagattgctacttcaaaacgtttgtgttttggggttgcttgtctatcctcggcgtcgtctcaagtctgtcactgtacatacgaaccaaaccggtttatcaccggcttgaacaagacaaggtttcattaa

SEQ ID NO: 556 - protein, 51 aa, Arabidopsis thaliana
CLTQSFASEEIATSKRLCFGVACLSSASSQVCHCTYEPNRFITGLNKTRFH

SEQ ID NO: 557 - DNA, 132 bp, Arabidopsis thaliana
  source 1..132: mol_type = genomic DNA
tgactcaatcgtttgcatcggaagagattgctacttcaaaacgtttgtgttttggggttgcttgtctatcctcggcgtcgtctcaagtctgtcactgtacatacgaaccaaaccggtttatcaccggcttga

SEQ ID NO: 558 - protein, 42 aa, Arabidopsis thaliana
LNRLHRKRLLLQNVCVLGLLVYPRRRLKSVTVHTNQTGLSPA

SEQ ID NO: 559 - DNA, 84 bp, Arabidopsis thaliana
  source 1..84: mol_type = genomic DNA
taggtgcatatagagagtcttagatgcatgtttgagttgtcactgttgattacttcatttcatgttgatgttatggtgttataa

SEQ ID NO: 560 - protein, 26 aa, Arabidopsis thaliana
VHIESLRCMFELSLLITSFHVDVMVL

SEQ ID NO: 561 - DNA, 147 bp, Arabidopsis thaliana
  source 1..147: mol_type = genomic DNA
tgaagatttctatgggtttttgagtttggagattttctcagtgaagtttattacataatcagattcgaagaagaagacatttcagccattgatggtctatttatagacgtagactcagaactaaccccactcgtgccggcttcctaa

SEQ ID NO: 562 - protein, 47 aa, Arabidopsis thaliana
RFLWVFEFGDFLSEVYYIIRFEEEDISAIDGLFIDVDSELTPLVPAS

SEQ ID NO: 563 - DNA, 54 bp, Arabidopsis thaliana
  source 1..54: mol_type = genomic DNA
tagaagcaaactggggaagatgaagatggagtggtgaagaacaaaaccgtataa

SEQ ID NO: 564 - protein, 16 aa, Arabidopsis thaliana
KQTGEDEDGVVKNKTV

SEQ ID NO: 565 - DNA, 324 bp, Arabidopsis thaliana
  source 1..324: mol_type = genomic DNA
tgaagatggagtggtgaagaacaaaaccgtataaccgttcggttcagaggtgccgaaccgaaccgacccgtaaaccgaaatcctcaaaagaaattgccgatcggtttgctactgttcaaaacctcggtgccgagaaccgaaactgtcggttttttcggttcgggtttctcggtttcttccgaactcccaggcctagtttggttttatttttcacgagttttgcttctcttttcatcggcgacgacgacgtcgagtttctgtcaaaacgttaacgatccgactcgagcgtcgacagtaagagaagaagacagcgattgtgtgtag

SEQ ID NO: 566 - protein, 106 aa, Arabidopsis thaliana
RWSGEEQNRITVRFRGAEPNRPVNRNPQKKLPIGLLLFKTSVPRTETVGFFGSGFSVSSELPGLVWFYFSRVLLLFSSATTTSSFCQNVNDPTRASTVREEDSDCV

SEQ ID NO: 567 - DNA, 54 bp, Arabidopsis thaliana; identical to SEQ ID NO: 563
  source 1..54: mol_type = genomic DNA

SEQ ID NO: 568 - protein, 16 aa, Arabidopsis thaliana
KQTGEDEDGVVKNKTV

SEQ ID NO: 569 - DNA, 324 bp, Arabidopsis thaliana; identical to SEQ ID NO: 565
  source 1..324: mol_type = genomic DNA

SEQ ID NO: 570 - protein, 106 aa, Arabidopsis thaliana; identical to SEQ ID NO: 566

SEQ ID NO: 571 - DNA, 144 bp, Arabidopsis thaliana
  source 1..144: mol_type = genomic DNA
tgaaaaaagaggaactttatcttgctgacggctgttataaaaagacgtggcatttcttctctgattgtgtttatttttatgacggagaagatgaacacacttgtaatctatcagactctaactgttactgttggtgttttctaa

SEQ ID NO: 572 - protein, 46 aa, Arabidopsis thaliana
KKRNFILLTAVIKRRGISSLIVFIFMTEKMNTLVIYQTLTVTVGVF

SEQ ID NO: 573 - DNA, 144 bp, Arabidopsis thaliana; identical to SEQ ID NO: 571
  source 1..144: mol_type = genomic DNA

SEQ ID NO: 574 - protein, 46 aa, Arabidopsis thaliana; identical to SEQ ID NO: 572

SEQ ID NO: 575 - DNA, 144 bp, Arabidopsis thaliana; identical to SEQ ID NO: 571
  source 1..144: mol_type = genomic DNA

SEQ ID NO: 576 - protein, 46 aa, Arabidopsis thaliana; identical to SEQ ID NO: 572

SEQ ID NO: 577 - DNA, 144 bp, Arabidopsis thaliana
  source 1..144: mol_type = genomic DNA
taactgcaaaaaaaatatcgaaacgagattctacaattagtctctagtcaaagagcttcatggcaatggtgtgaccccaaagttagtcttcacatgtttcttaagtttcaaacattgaatttttttccttttataaatagttaa

SEQ ID NO: 578 - protein, 46 aa, Arabidopsis thaliana
LQKKYRNEILQLVSSQRASWQWCDPKVSLHMFLKFQTLNFFPFINS

SEQ ID NO: 579 - DNA, 66 bp, Arabidopsis thaliana
  source 1..66: mol_type = genomic DNA
tagattgatgaaagtgaggaaatgggagaagaaatgaagaacacaggatgtgtcttcttcttctaa

SEQ ID NO: 580 - protein, 20 aa, Arabidopsis thaliana
IDESEEMGEEMKNTGCVFFF

SEQ ID NO: 581 - DNA, 60 bp, Arabidopsis thaliana
  source 1..60: mol_type = genomic DNA
tgaggaaatgggagaagaaatgaagaacacaggatgtgtcttcttcttctaagtcactaa

SEQ ID NO: 582 - protein, 18 aa, Arabidopsis thaliana
GNGRRNEEHRMCLLLLSH

SEQ ID NO: 583 - DNA, 60 bp, Arabidopsis thaliana; identical to SEQ ID NO: 581
  source 1..60: mol_type = genomic DNA

SEQ ID NO: 584 - protein, 18 aa, Arabidopsis thaliana
GNGRRNEEHRMCLLLLSH

SEQ ID NO: 585 - DNA, 66 bp, Arabidopsis thaliana; identical to SEQ ID NO: 579
  source 1..66: mol_type = genomic DNA

SEQ ID NO: 586 - protein, 20 aa, Arabidopsis thaliana
IDESEEMGEEMKNTGCVFFF

SEQ ID NO: 587 - DNA, 57 bp, Arabidopsis thaliana
  source 1..57: mol_type = genomic DNA
tgagagtttgcttacctcggaacttctctccgacatcgtaccgtctcgtccgattga

SEQ ID NO: 588 - protein, 17 aa, Arabidopsis thaliana
EFAYLGTSLRHRTVSSD

SEQ ID NO: 589 - DNA, 54 bp, Arabidopsis thaliana
  source 1..54: mol_type = genomic DNA
taaagagattggttatatcaatcttatcaaacccacctctctcgggattattga

SEQ ID NO: 590 - protein, 16 aa, Arabidopsis thaliana
RDWLYQSYQTHLSRDY

SEQ ID NO: 591 - DNA, 129 bp, Arabidopsis thaliana
  source 1..129: mol_type = genomic DNA
taatttccattttcgttatctctctctctcgccgatcaaaccctaggtgtatcaattcgttcagattcccggcggttggtctcactgtcatgtaggtttgattcatcttctcttctggatcttgagtga

SEQ ID NO: 592 - protein, 41 aa, Arabidopsis thaliana
FPFSLSLSLADQTLGVSIRSDSRRLVSLSCRFDSSSLLDLE

SEQ ID NO: 593 - DNA, 213 bp, Arabidopsis thaliana
  source 1..213: mol_type = genomic DNA
taacggagaatccctgaatccgattactgcgattcacattttcccgatgacttccactctaatctcctcaaacctctcttcctctttcttcccaacccaaaatatccaccgaattcgaatcccgacgacttcaattcccggaagtttcaacattcgcgcacgccgttcaaaaatcgtcgccaaatctctcgatcttcctcttcttccttttag

SEQ ID NO: 594 - protein, 69 aa, Arabidopsis thaliana
RRIPESDYCDSHFPDDFHSNLLKPLFLFLPNPKYPPNSNPDDFNSRKFQHSRTPFKNRRQISRSSSSSF

SEQ ID NO: 595 - DNA, 159 bp, Arabidopsis thaliana
  source 1..159: mol_type = genomic DNA
taatctcctcaaacctctcttcctctttcttcccaacccaaaatatccaccgaattcgaatcccgacgacttcaattcccggaagtttcaacattcgcgcacgccgttcaaaaatcgtcgccaaatctctcgatcttcctcttcttccttttagcatga

SEQ ID NO: 596 - protein, 51 aa, Arabidopsis thaliana
SPQTSLPLSSQPKISTEFESRRLQFPEVSTFAHAVQKSSPNLSIFLFFLLA

SEQ ID NO: 597 - DNA, 129 bp, Arabidopsis thaliana
  source 1..129: mol_type = genomic DNA
tgaaaactttatcctcaagagattaggaaaatctcattcattatgttaaaaatcccttttggggattatatttatcagagaaaaagattcgaattgagtgtcttcatgatttgggcaaagctaatctga

SEQ ID NO: 598 - protein, 41 aa, Arabidopsis thaliana
KLYPQEIRKISFIMLKIPFGDYIYQRKRFELSVFMIWAKLI

SEQ ID NO: 599 - DNA, 51 bp, Arabidopsis thaliana
  source 1..51: mol_type = genomic DNA
taagatggcgaaggaaccagttcgtgttcttgttaccggagctgcaggtaa

SEQ ID NO: 600 - protein, 15 aa, Arabidopsis thaliana
DGEGTSSCSCYRSCR

SEQ ID NO: 601 - DNA, 96 bp, Arabidopsis thaliana
  source 1..96: mol_type = genomic DNA
taaagttttgatttttcgacatacccagattgtgattatgtgttagattatgctttcgggttttcaaagttatgggtagttcttgaattatgttga

SEQ ID NO: 602 - protein, 30 aa, Arabidopsis thaliana
SFDFSTYPDCDYVLDYAFGFSKLWVVLELC

SEQ ID NO: 603 - DNA, 54 bp, Arabidopsis thaliana
  source 1..54: mol_type = genomic DNA
tgattatgtgttagattatgctttcgggttttcaaagttatgggtagttcttga

SEQ ID NO: 604 - protein, 16 aa, Arabidopsis thaliana
LCVRLCFRVFKVMGSS

SEQ ID NO: 605 - DNA, 252 bp, Arabidopsis thaliana
  source 1..252: mol_type = genomic DNA
taaaacctaaaccctaattgtcttctccggcgaattcaatttcccggggccaccgaggctatttccggtttgtcgttagaattcaccgatcgatgtcgctcgtccgttgtttatccctcagatcggttctcaatcctcaacgttaccgatcatcttactcctttctcatccatcttcagaatcctcgtgaagaagaagaacctacacacaaaactcgaagttaccacagtatcattcaccagaactcgttaa

SEQ ID NO: 606 - protein, 82 aa, Arabidopsis thaliana
NLNPNCLLRRIQFPGATEAISGLSLEFTDRCRSSVVYPSDRFSILNVTDHLTPFSSIFRILVKKKNLHTKLEVTTVSFTRTR

SEQ ID NO: 607 - DNA, 78 bp, Arabidopsis thaliana
  source 1..78: mol_type = genomic DNA
taatcttgcaaagtttcagtctcaggtggttcacagttaatgctacttgcaatgatgaatccatcccaatttcgataa

SEQ ID NO: 608 - protein, 24 aa, Arabidopsis thaliana
SCKVSVSGGSQLMLLAMMNPSQFR

SEQ ID NO: 609 - DNA, 141 bp, Arabidopsis thaliana
  source 1..141: mol_type = genomic DNA
tgattttcaacttattacaacaacaacaacaacaaaataatcttgcaaagtttcagtctcaggtggttcacagttaatgctacttgcaatgatgaatccatcccaatttcgataacctctactgaggcatccaaatgttga

SEQ ID NO: 610 - protein, 45 aa, Arabidopsis thaliana
FSTYYNNNNNKIILQSFSLRWFTVNATCNDESIPISITSTEASKC

SEQ ID NO: 611 - DNA, 270 bp, Arabidopsis thaliana
  source 1..270: mol_type = genomic DNA
taactgacaaatgaagcatatagtaaagatcttgagcctgttggtggctatctctgccttctggattggtcttttgcaggctgcaattattcctcgaagccatacatggttgctaccgatctactttgttgtatccctcggatgctatggcctattaatggttggagtcgggctcatgcagtttcctacttgcccccaagaagcagttctgctgcagaagaggctaaggacttcttcaagcacaaaggggtagatgttggatcgaattga

SEQ ID NO: 612 - protein, 88 aa, Arabidopsis thaliana
LTNEAYSKDLEPVGGYLCLLDWSFAGCNYSSKPYMVATDLLCCIPRMLWPINGWSRAHAVSYLPPRSSSAAEEAKDFFKHKGVDVGSN

SEQ ID NO: 613 - DNA, 264 bp, Arabidopsis thaliana
  source 1..264: mol_type = genomic DNA
taaattctaaacaaaaaacaaaagcataaaaaatggcttcatggaagaaaacaatcgcaacaccattcaagaaagcggcaacgttctttaaccaaccgcagcaaacgaaccgccacgcaaacgcaaaggcgagagaagaacatgagaaacgaacggtacaggagcttcaaggtgatgtcatggcttgtggttatgaagatgtcctcgtcatgtggtcaattcttgacaagtcaaactcttcaaacaacctctcttcttgattag

SEQ ID NO: 614 - protein, 86 aa, Arabidopsis thaliana
ILNKKQKHKKWLHGRKQSQHHSRKRQRSLTNRSKRTATQTQRREKNMRNERYRSFKVMSWLVVMKMSSSCGQFLTSQTLQTTSLLD

SEQ ID NO: 615 - DNA, 87 bp, Arabidopsis thaliana
  source 1..87: mol_type = genomic DNA
taagaacacaacttcgactgtccctgtggaagatataattttacatgtccgaattccggagaagaaaaagatgaagtgattgattaa

SEQ ID NO: 616 - protein, 27 aa, Arabidopsis thaliana
EHNFDCPCGRYNFTCPNSGEEKDEVID

SEQ ID NO: 617 - DNA, 99 bp, Arabidopsis thaliana
  source 1..99: mol_type = genomic DNA
taagaggcttctttttcaacttctcattcttcatttccggcgaagttatggaccgatcaacgccggaacataactcatctccctcacacaagcgtctaa

SEQ ID NO: 618 - protein, 31 aa, Arabidopsis thaliana
EASFSTSHSSFPAKLWTDQRRNITHLPHTSV

SEQ ID NO: 619 - DNA, 66 bp, Arabidopsis thaliana
  source 1..66: mol_type = genomic DNA
tagcccttgtcttcttcattgtcccctttttctcactttaagatctttcttgttcttagcccatga

SEQ ID NO: 620 - protein, 20 aa, Arabidopsis thaliana
PLSSSLSPFSHFKIFLVLSP

SEQ ID NO: 621 - DNA, 189 bp, Arabidopsis thaliana
  source 1..189: mol_type = genomic DNA
tagacgaaagaaagaaaacagttttactcagcagagaaaaagttgcatcttcttcttcttctttttctttttccgatttttctctccatttttctgatctttctctccaattttatcagtcgccatttgttactgttaaaccccaactgttatatctctttttcttcttccaaaacatgttttaattaa

SEQ ID NO: 622 - protein, 61 aa, Arabidopsis thaliana
TKERKQFYSAEKKLHLLLLLFLFPIFLSIFLIFLSNFISRHLLLLNPNCYISFSSSKTCFN

SEQ ID NO: 623 - DNA, 93 bp, Arabidopsis thaliana
  source 1..93: mol_type = genomic DNA
tgattcgcagtcatagtttaccaatttcttctaactcgcaagcaatggcttgccttggaagaaaattctccagaattggttgaattcgtgtaa

SEQ ID NO: 624 - protein, 29 aa, Arabidopsis thaliana
FAVIVYQFLLTRKQWLALEENSPELVEFV

SEQ ID NO: 625 - DNA, 108 bp, Arabidopsis thaliana
  source 1..108: mol_type = genomic DNA
taacaaaatcaaattctcttcactctgattcgcagtcatagtttaccaatttcttctaactcgcaagcaatggcttgccttggaagaaaattctccagaattggttga

SEQ ID NO: 626 - protein, 34 aa, Arabidopsis thaliana
QNQILFTLIRSHSLPISSNSQAMACLGRKFSRIG

SEQ ID NO: 627 - DNA, 90 bp, Arabidopsis thaliana
  source 1..90: mol_type = genomic DNA
tagttgatgatgatgaagatggtgaaacagattcgtatagggttttctaatcggcggtgttcgctgttcgtgaactctttattggagtaa

SEQ ID NO: 628 - protein, 28 aa, Arabidopsis thaliana
LMMMKMVKQIRIGFSNRRCSLFVNSLLE

SEQ ID NO: 629 - DNA, 66 bp, Arabidopsis thaliana
  source 1..66: mol_type = genomic DNA
taaaccgccggagcaaaaacccttttctcacaacccgaagacaaatgcggtcctaatgctatctga

SEQ ID NO: 630 - protein, 20 aa, Arabidopsis thaliana
TAGAKTLFSQPEDKCGPNAI

SEQ ID NO: 631 - DNA, 132 bp, Arabidopsis thaliana
  source 1..132: mol_type = genomic DNA
taaccattttcgtatctgctaccaacttcctgtaatttttctcgggaaaaacaaaaaaacataaaacccaaatctttaagcgattttttcatggcgtttctgatggaggtcgatgaagaagaagagatatga

SEQ ID NO: 632 - protein, 42 aa, Arabidopsis thaliana
PFSYLLPTSCNFSREKQKNIKPKSLSDFFMAFLMEVDEEEEI

SEQ ID NO: 633 - DNA, 54 bp, Arabidopsis thaliana
  source 1..54: mol_type = genomic DNA
tagttaattagtttgattaaaatatgtagcttagtggttaatattaatatttag

SEQ ID NO: 634 - protein, 16 aa, Arabidopsis thaliana
LISLIKICSLVVNINI

SEQ ID NO: 635 - DNA, 111 bp, Arabidopsis thaliana
  source 1..111: mol_type = genomic DNA
taaagttttcatttttatttcaatgagagctcgaagaaggagaatatgggtttgagaactgataatattatggcttcgtttcgaggtggaatcggggtttctaatggctga

SEQ ID NO: 636 - protein, 35 aa, Arabidopsis thaliana
SFHFYFNESSKKENMGLRTDNIMASFRGGIGVSNG

SEQ ID NO: 637 - DNA, 111 bp, Arabidopsis thaliana; identical to SEQ ID NO: 635
  source 1..111: mol_type = genomic DNA

SEQ ID NO: 638 - protein, 35 aa, Arabidopsis thaliana; identical to SEQ ID NO: 636

SEQ ID NO: 639 - DNA, 93 bp, Arabidopsis thaliana
  source 1..93: mol_type = genomic DNA
tgattttttttttttttttcttctcgtcgtgttgtttgttgtggaaatagttatcggccatttctttattttattcttgacagtttgttttga

SEQ ID NO: 640 - protein, 29 aa, Arabidopsis thaliana
FFFFFSSRRVVCCGNSYRPFLYFILDSLF

SEQ ID NO: 641 - DNA, 159 bp, Arabidopsis thaliana
  source 1..159: mol_type = genomic DNA
tgatatatggagtgtgaagaggataatggaatggagaccttgcaaatggtggttacaaggacacctcactcacaactgctttggttttttgttcaaatcctgcagctctacctgctaaaactaatggatatatacgcgttgattgctatggcggcctga

SEQ ID NO: 642 - protein, 51 aa, Arabidopsis thaliana
YMECEEDNGMETLQMVVTRTPHSQLLWFFVQILQLYLLKLMDIYALIAMAA

SEQ ID NO: 643 - DNA, 78 bp, Arabidopsis thaliana
  source 1..78: mol_type = genomic DNA
taaatgagatcatctctcttcccaaaagccaagtccatacctttcctccatggcttcttcattgctttcccaaactag

SEQ ID NO: 644 - protein, 24 aa, Arabidopsis thaliana
MRSSLFPKAKSIPFLHGFFIAFPN

SEQ ID NO: 645 - DNA, 87 bp, Arabidopsis thaliana
  source 1..87: mol_type = genomic DNA
tgagatcatctctcttcccaaaagccaagtccatacctttcctccatggcttcttcattgctttcccaaactagtaaaatctcctag

SEQ ID NO: 646 - protein, 27 aa, Arabidopsis thaliana
DHLSSQKPSPYLSSMASSLLSQTSKIS

SEQ ID NO: 647 - DNA, 90 bp, Arabidopsis thaliana
  source 1..90: mol_type = genomic DNA
tgatttctcaaagatctgttttttttcttcttcatatttgtaaattttcattttttccgtttaaaaattggatcttttttcttcagctaa

SEQ ID NO: 648 - protein, 28 aa, Arabidopsis thaliana
FLKDLFFFFFIFVNFHFFRLKIGSFFFS

SEQ ID NO: 649 - DNA, 183 bp, Arabidopsis thaliana
  source 1..183: mol_type = genomic DNA
tgaacgcatgaacaagaactctttaatcttctttttcctcagtttcttcttatgggatcaacaaaaacttgtcttccctctttcttgatttctcaaagatctgttttttttcttcttcatatttgtaaattttcattttttccgtttaaaaattggatcttttttcttcagctaaaaccctga

SEQ ID NO: 650 - protein, 59 aa, Arabidopsis thaliana
THEQELFNLLFPQFLLMGSTKTCLPSFLISQRSVFFLLHICKFSFFPFKNWIFFLQLKP

SEQ ID NO: 651 - DNA, 87 bp, Arabidopsis thaliana
  source 1..87: mol_type = genomic DNA
tgatacacaaaagtacaagagaattcaacgctgcagagcgaaaccatcttatcttctatgtattgggccaaagtcaagccgaagtga

SEQ ID NO: 652 - protein, 27 aa, Arabidopsis thaliana
YTKVQENSTLQSETILSSMYWAKVKPK

SEQ ID NO: 653 - DNA, 111 bp, Arabidopsis thaliana
  source 1..111: mol_type = genomic DNA
taattcacgagatccccaatctctctttcgatgccttttcacagagtatctaatcctcctcctcctccattcatcttctccttctccattcttctccgtcgtctccattaa

SEQ ID NO: 654 - protein, 35 aa, Arabidopsis thaliana
FTRSPISLSMPFHRVSNPPPPPFIFSFSILLRRLH

SEQ ID NO: 655 - DNA, 147 bp, Arabidopsis thaliana
  source 1..147: mol_type = genomic DNA
tgagaattgggaatctgttttggttttgcccgagaaaaaaacgagagagatgggtttcatcttctcgaccgagaaagttgtgtatgttcttcttctcatcttcgtttgcttggaaaatttcggatcaaatgctcaacttttgcctga

SEQ ID NO: 656 - protein, 47 aa, Arabidopsis thaliana
ELGICFGFAREKNERDGFHLLDRESCVCSSSHLRLLGKFRIKCSTFA

SEQ ID NO: 657 - DNA, 84 bp, Arabidopsis thaliana
  source 1..84: mol_type = genomic DNA
tagttccccattgtagatctaccaacgaacctccatctgagagaactatctccgctcgccgtcgacttaaaactctttgattaa

SEQ ID NO: 658 - protein, 26 aa, Arabidopsis thaliana
FPIVDLPTNLHLRELSPLAVDLKLFD

SEQ ID NO: 659 - DNA, 102 bp, Arabidopsis thaliana
  source 1..102: mol_type = genomic DNA
taaaaagagaagagaggccctctcacggtgccggccgaaaccgaccaccaaagaggcaaaacggcgtttgaagatttgatctggtttgcggcggctaactag

SEQ ID NO: 660 - protein, 32 aa, Arabidopsis thaliana
KEKRGPLTVPAETDHQRGKTAFEDLIWFAAAN

SEQ ID NO: 661 - DNA, 201 bp, Arabidopsis thaliana
  source 1..201: mol_type = genomic DNA
tagagagagagaactagggttttttgtttagtttgtgtttttgttgttgtattttacttaagatgttgtttttgtttaaatgaaccaaaaaaaggaagtcttagcttaacaaaccgacgccgtttagcgatgtgcatttcaacaaactgcgatgtcgttttgacattttattgctcactcaagtcattttgctactgctga

SEQ ID NO: 662 - protein, 65 aa, Arabidopsis thaliana
RERTRVFCLVCVFVVVFYLRCCFCLNEPKKGSLSLTNRRRLAMCISTNCDVVLTFYCSLKSFCYC

SEQ ID NO: 663 - DNA, 135 bp, Arabidopsis thaliana
  source 1..135: mol_type = genomic DNA
taagccacaaagaaggaggagccgccgccggctaaaaaaaatcgacacaaaggaaaaaaaaaactaaaaagagaagagaggccctctcacggtgccggccgaaaccgaccaccaaagaggcaaaacggcgtttga

SEQ ID NO: 664 - protein, 43 aa, Arabidopsis thaliana
ATKKEEPPPAKKNRHKGKKKLKREERPSHGAGRNRPPKRQNGV

SEQ ID NO: 665 - DNA, 111 bp, Arabidopsis thaliana
  source 1..111: mol_type = genomic DNA
taaaaaaaatcgacacaaaggaaaaaaaaaactaaaaagagaagagaggccctctcacggtgccggccgaaaccgaccaccaaagaggcaaaacggcgtttgaagatttga

SEQ ID NO: 666 - protein, 35 aa, Arabidopsis thaliana
KKSTQRKKKTKKRREALSRCRPKPTTKEAKRRLKI

SEQ ID NO: 667 - DNA, 123 bp, Arabidopsis thaliana
  source 1..123: mol_type = genomic DNA
tgacgaagaaatccaccagatctgctgccgtcgtcgagagtcatagttccccattgtagatctaccaacgaacctccatctgagagaactatctccgctcgccgtcgacttaaaactctttga

SEQ ID NO: 668 - protein, 39 aa, Arabidopsis thaliana
RRNPPDLLPSSRVIVPHCRSTNEPPSERTISARRRLKTL

SEQ ID NO: 669 - DNA, 54 bp, Arabidopsis thaliana
  source 1..54: mol_type = genomic DNA
taaaactcgattaatctcatcaaattttgcatcttttttacgaaattcgactga

SEQ ID NO: 670 - protein, 16 aa, Arabidopsis thaliana
NSINLIKFCIFFTKFD

SEQ ID NO: 671 - DNA, 60 bp, Arabidopsis thaliana
  source 1..60: mol_type = genomic DNA
tgaacctttcttctctcgctatctgtttctgagtttttggtttcaggttcgagaaattaa

SEQ ID NO: 672 - protein, 18 aa, Arabidopsis thaliana
TFLLSLSVSEFLVSGSRN

SEQ ID NO: 673 - DNA, 78 bp, Arabidopsis thaliana
  source 1..78: mol_type = genomic DNA
taaatgcgaatttatgggtttgatctatacagatctgtgtaccctaatttatgtctctggcgtaacggtcatatttaa

SEQ ID NO: 674 - protein, 24 aa, Arabidopsis thaliana
MRIYGFDLYRSVYPNLCLWRNGHI

SEQ ID NO: 675 - DNA, 135 bp, Arabidopsis thaliana
  source 1..135: mol_type = genomic DNA
tgaagcagcaagagagagagagagactgacagagacagagttaaatgcgaatttatgggtttgatctatacagatctgtgtaccctaatttatgtctctggcgtaacggtcatatttaaccccatttcaatttga

SEQ ID NO: 676 - protein, 43 aa, Arabidopsis thaliana
SSKRERETDRDRVKCEFMGLIYTDLCTLIYVSGVTVIFNPISI

SEQ ID NO: 677 - DNA, 153 bp, Arabidopsis thaliana
  source 1..153: mol_type = genomic DNA
tgaagtgatagctcagagcattggactctccactctttctccggacgtctcagccgctcttgctcccgatgtcgagtatcgcgtccgagaggtcatgcaggaagctatcaaatgcatgcgtcatgctcgacgcaccactttaatggctcatga

SEQ ID NO: 678 - protein, 49 aa, Arabidopsis thaliana
SDSSEHWTLHSFSGRLSRSCSRCRVSRPRGHAGSYQMHASCSTHHFNGS

SEQ ID NO: 679 - DNA, 81 bp, Arabidopsis thaliana
  source 1..81: mol_type = genomic DNA
tgagtatgcaagcactttccctgcagagctacaaagattactaaacacagttcgcgaactagacgagagatctcaatgtaa

SEQ ID NO: 680 - protein, 25 aa, Arabidopsis thaliana
VCKHFPCRATKITKHSSRTRREISM

SEQ ID NO: 681 - DNA, 435 bp, Arabidopsis thaliana
  source 1..435: mol_type = genomic DNA
tagattagtattaattatccattttgggctataaatagagaccctttgagatccaagtttatcgtcaaagcaaccaaacacataaaagagagatttaatacaaaagaaagagaaaaaagaaagatatggcaggactcatcaacaagatcggagacgcactccacattggaggaggcaacaaggaaggtgagcacaagaaggaagaggaacacaagaaacacgttgacgagcacaagagtggtgagcacaaagaaggtattgttgacaagatcaaagacaagatccacggtggtgaaggtaaaagccacgacggagaaggcaaaagccacgacggtgagaagaaaaagaagaaggacaagaaggagaagaaacatcatgatgatggtcaccacagcagcagcagtgacagcgacagcgattaaggtgaggaagtga

SEQ ID NO: 682 - protein, 143 aa, Arabidopsis thaliana
ISINYPFWAINRDPLRSKFIVKATKHIKERFNTKEREKRKIWQDSSTRSETHSTLEEATRKVSTRRKRNTRNTLTSTRVVSTKKVLLTRSKTRSTVVKVKATTEKAKATTVRRKRRRTRRRRNIMMMVTTAAAVTATAIKVRK

SEQ ID NO: 683 - DNA, 144 bp, Arabidopsis thaliana
  source 1..144: mol_type = genomic DNA
taaatcgttccaacattggtctctcactgttactatctatgttcctcgcaaactttatcaccgatcttgaagcttcttctcatcaagatctcaaccaaccgtaccggaccggttatcactttcaacctctcaaaaattggatga

SEQ ID NO: 684 - protein, 46 aa, Arabidopsis thaliana
IVPTLVSHCYYLCSSQTLSPILKLLLIKISTNRTGPVITFNLSKIG

SEQ ID NO: 685 - DNA, 87 bp, Arabidopsis thaliana
  source 1..87: mol_type = genomic DNA
tgaagcttcttctcatcaagatctcaaccaaccgtaccggaccggttatcactttcaacctctcaaaaattggatgaacgatcctaa

SEQ ID NO: 686 - protein, 27 aa, Arabidopsis thaliana
SFFSSRSQPTVPDRLSLSTSQKLDERS

SEQ ID NO: 687 - DNA, 51 bp, Arabidopsis thaliana
  source 1..51: mol_type = genomic DNA
taagctcatttcggtcaagtaggtgggagaagaagccatggaaggggatga

SEQ ID NO: 688 - protein, 15 aa, Arabidopsis thaliana
AHFGQVGGRRSHGRG

SEQ ID NO: 689 - DNA, 129 bp, Arabidopsis thaliana
  source 1..129: mol_type = genomic DNA
taaaccctagtgaaccaaatctgtatccaagatgtctcattttgcttgaaggctgctaaagtttcgatttttaagcgatccctttctgcttcgatgccactgcacagtaagctcatttcggtcaagtag

SEQ ID NO: 690 - protein, 41 aa, Arabidopsis thaliana
TLVNQICIQDVSFCLKAAKVSIFKRSLSASMPLHSKLISVK

SEQ ID NO: 691 - DNA, 51 bp, Arabidopsis thaliana; identical to SEQ ID NO: 687
  source 1..51: mol_type = genomic DNA

SEQ ID NO: 692 - protein, 15 aa, Arabidopsis thaliana
AHFGQVGGRRSHGRG

SEQ ID NO: 693 - DNA, 126 bp, Arabidopsis thaliana
  source 1..126: mol_type = genomic DNA
tgagttcttttttgctctgatatttgtgtttgtctcaaactcttattgttcaatatccgacaaggatctattatcagtcttcgctgccaactctgttctcatgtctactgttgctcctcctgctga

SEQ ID NO: 694 - protein, 40 aa, Arabidopsis thaliana
VLFCSDICVCLKLLLFNIRQGSIISLRCQLCSHVYCCSSC

SEQ ID NO: 695 - DNA, 117 bp, Arabidopsis thaliana
  source 1..117: mol_type = genomic DNA
taatatttattattgccattgaaaaagactcatttgatcgagagagaaaaagaatcatttgaaccaaaagcatctttttctatcttttcaaatgcttacttccttcaaatcctctag

SEQ ID NO: 696 - protein, 37 aa, Arabidopsis thaliana
YLLLPLKKTHLIEREKESFEPKASFSIFSNAYFLQIL

SEQ ID NO: 697 - DNA, 171 bp, Arabidopsis thaliana
  source 1..171: mol_type = genomic DNA
taaaccatactcctcaattacgcaacgattaagaaagagaacttttttttttccgggagaactcttggtttttttccaggaaaaattcactttttctgttctctttctcatttctgggttatggtcttgcttgcaaaagttttctctctatctctgcaacatcgtacttga

SEQ ID NO: 698 - protein, 55 aa, Arabidopsis thaliana
TILLNYATIKKENFFFSGRTLGFFPGKIHFFCSLSHFWVMVLLAKVFSLSLQHRT

SEQ ID NO: 699 - DNA, 126 bp, Arabidopsis thaliana
  source 1..126: mol_type = genomic DNA
taagaaagagaacttttttttttccgggagaactcttggtttttttccaggaaaaattcactttttctgttctctttctcatttctgggttatggtcttgcttgcaaaagttttctctctatgtaa

SEQ ID NO: 700 - protein, 40 aa, Arabidopsis thaliana
ERELFFFRENSWFFSRKNSLFLFSFSFLGYGLACKSFLSM

SEQ ID NO: 701 - DNA, 174 bp, Arabidopsis thaliana
  source 1..174: mol_type = genomic DNA
taaaccatactcctcaattacgcaacgattaagaaagagaacttttttttttccgggagaactcttggtttttttccaggaaaaattcactttttctgttctctttctcatttctgggttatggtcttgcttgcaaaagttttctctctatgtaagcacttatctccttgctag

SEQ ID NO: 702 - protein, 56 aa, Arabidopsis thaliana
TILLNYATIKKENFFFSGRTLGFFPGKIHFFCSLSHFWVMVLLAKVFSLCKHLSPC

SEQ ID NO: 703 - DNA, 72 bp, Arabidopsis thaliana
  source 1..72: mol_type = genomic DNA
taagttccagagatgatgaagaaaaatctattttggattaagctcaaatatgaactctgtaattcattatag

SEQ ID NO: 704 - protein, 22 aa, Arabidopsis thaliana
VPEMMKKNLFWIKLKYELCNSL

SEQ ID NO: 705 - DNA, 69 bp, Arabidopsis thaliana
  source 1..69: mol_type = genomic DNA
tgaccggatttcgggtttgtctccgccgttgttatgtttttcttccagttgtttatttacttacaataa

SEQ ID NO: 706 - protein, 21 aa, Arabidopsis thaliana
PDFGFVSAVVMFFFQLFIYLQ

SEQ ID NO: 707 - DNA, 192 bp, Arabidopsis thaliana
  source 1..192: mol_type = genomic DNA
taatatcttttagagaaagctaaactttccgatcaaacctttgccttctggtttgattcgaaggctcatgttcctcacatagtgggctcgtgtctggcatctctgactactttagcggagttggctagctttcttctgacagcgatggcttccttagcgtcgtcttggtcggcaccactccggaagcagtag

SEQ ID NO: 708 - protein, 62 aa, Arabidopsis thaliana
YLLEKAKLSDQTFAFWFDSKAHVPHIVGSCLASLTTLAELASFLLTAMASLASSWSAPLRKQ

SEQ ID NO: 709 - DNA, 135 bp, Arabidopsis thaliana
  source 1..135: mol_type = genomic DNA
taaatttcgctattcctctctctctctctctctctctctctctctctctctctcttcttcttcttctccgttcgtgctctggactcgctcgaaatcgatccgatgataatttatgcagctcgaaacttaatttag

SEQ ID NO: 710 - protein, 43 aa, Arabidopsis thaliana
ISLFLSLSLSLSLSLSLFFFFSVRALDSLEIDPMIIYAARNLI

SEQ ID NO: 711 - DNA, 90 bp, Arabidopsis thaliana
  source 1..90: mol_type = genomic DNA
taacccaaatctcaaaccttctctgttagcttgcactcgcatatgcatataggtatgtatgtgggagtgtatgcactaatcttcatgtaa

SEQ ID NO: 712 - protein, 28 aa, Arabidopsis thaliana
PKSQTFSVSLHSHMHIGMYVGVYALIFM

SEQ ID NO: 713 - DNA, 147 bp, Arabidopsis thaliana
  source 1..147: mol_type = genomic DNA
tgagaactaagcatcaacaacaagaacaatgagagcgaagtggaagaagaagcgcatgaggagattaaagaggaagcgtcgaaagatgagacagcgatccaagtagactccaagttcctcccccaaataactatcggctctctgtga

SEQ ID NO: 714 - protein, 47 aa, Arabidopsis thaliana
ELSINNKNNESEVEEEAHEEIKEEASKDETAIQVDSKFLPQITIGSL

SEQ ID NO: 715 - DNA, 90 bp, Arabidopsis thaliana
  source 1..90: mol_type = genomic DNA
taacagaaagaaccaaaacaaacgaaacaaatggatttagggatttcgaaaagccaccatgcctttaactcgtcaacaatggcgacctaa

SEQ ID NO: 716 - protein, 28 aa, Arabidopsis thaliana
QKEPKQTKQMDLGISKSHHAFNSSTMAT

SEQ ID NO: 717 - DNA, 90 bp, Arabidopsis thaliana; identical to SEQ ID NO: 715
  source 1..90: mol_type = genomic DNA

SEQ ID NO: 718 - protein, 28 aa, Arabidopsis thaliana
QKEPKQTKQMDLGISKSHHAFNSSTMAT

SEQ ID NO: 719 - DNA, 108 bp, Arabidopsis thaliana
  source 1..108: mol_type = genomic DNA
taactcagatccgaaaatctctcctttcccaaaaattcttctatctttctcctcaattctcttattcacatgaccaagtcttacttctttcctaatcaacaatgttga

SEQ ID NO: 720 - protein, 34 aa, Arabidopsis thaliana
LRSENLSFPKNSSIFLLNSLIHMTKSYFFPNQQC

SEQ ID NO: 721 - DNA, 228 bp, Arabidopsis thaliana
  source 1..228: mol_type = genomic DNA
tagaaaataatacacaaccaaacatctaaaagatactataatagtagagatcaaagacctgagcaaaaactgaaagaaaaaaaaaaaaaaaaaaaaagacttctcctcaaaaatggcgtttacactaggtggaagagctcgtcgtctagtctctgcaacatcagttcatcaaaatggttgcttacacaaactgcaacaaattggatcggatcggtttcagcttggtga

SEQ ID NO: 722 - protein, 74 aa, Arabidopsis thaliana
KIIHNQTSKRYYNSRDQRPEQKLKEKKKKKKRLLLKNGVYTRWKSSSSSLCNISSSKWLLTQTATNWIGSVSAW

SEQ ID NO: 723 - DNA, 189 bp, Arabidopsis thaliana
  source 1..189: mol_type = genomic DNA
tgaaagaaaaaaaaaaaaaaaaaaaaagacttctcctcaaaaatggcgtttacactaggtggaagagctcgtcgtctagtctctgcaacatcagttcatcaaaatggttgcttacacaaactgcaacaaattggatcggatcggtttcagcttggtgaagcaaaagcaataagattactacccaggtga

SEQ ID NO: 724 - protein, 61 aa, Arabidopsis thaliana
KKKKKKKKDFSSKMAFTLGGRARRLVSATSVHQNGCLHKLQQIGSDRFQLGEAKAIRLLPR

SEQ ID NO: 725 - DNA, 96 bp, Arabidopsis thaliana
  source 1..96: mol_type = genomic DNA
tagtctctgcaacatcagttcatcaaaatggttgcttacacaaactgcaacaaattggatcggatcggtttcagcttggtgaagcaaaagcaataa

SEQ ID NO: 726 - protein, 30 aa, Arabidopsis thaliana
SLQHQFIKMVAYTNCNKLDRIGFSLVKQKQ

SEQ ID NO: 727 - DNA, 51 bp, Arabidopsis thaliana
  source 1..51: mol_type = genomic DNA
tagctaaaggaatgtcttgtactctttttgttgttgttgttgattttttga

SEQ ID NO: 728 - protein, 15 aa, Arabidopsis thaliana
LKECLVLFLLLLLIF

SEQ ID NO: 729 - DNA, 129 bp, Arabidopsis thaliana
  source 1..129: mol_type = genomic DNA
tgaagctgccacgaattggcgtattttagattgatacgtcaaagctcctcctcgcgcacgttagctaaaggaatgtcttgtactctttttgttgttgttgttgattttttgaacaaagaaagaaactaa

SEQ ID NO: 730 - protein, 41 aa, Arabidopsis thaliana
SCHELAYFRLIRQSSSSRTLAKGMSCTLFVVVVDFLNKERN

SEQ ID NO: 731 - DNA, 51 bp, Arabidopsis thaliana; identical to SEQ ID NO: 727
  source 1..51: mol_type = genomic DNA

SEQ ID NO: 732 - protein, 15 aa, Arabidopsis thaliana
LKECLVLFLLLLLIF

SEQ ID NO: 733 - DNA, 99 bp, Arabidopsis thaliana
  source 1..99: mol_type = genomic DNA
tgactgattttgaaacgattagggtttaatttgttggacttgggaagtgtaatggtgttttgctcagaaatcgtttgttttagtgccgacggtggttga

SEQ ID NO: 734 - protein, 31 aa, Arabidopsis thaliana
LILKRLGFNLLDLGSVMVFCSEIVCFSADGG

SEQ ID NO: 735 - DNA, 54 bp, Arabidopsis thaliana
  source 1..54: mol_type = genomic DNA
taatggtgttttgctcagaaatcgtttgttttagtgccgacggtggttgagtaa

SEQ ID NO: 736 - protein, 16 aa, Arabidopsis thaliana
WCFAQKSFVLVPTVVE

SEQ ID NO: 737 - DNA, 297 bp, Arabidopsis thaliana
  source 1..297: mol_type = genomic DNA
taaagttttgatttttataatcaaatttcctcgaattgctcgacaaaagtttattcctttaccatcacaatttgtagtttacccagatccttttctcctctgttttttctttcgcattgttatcttcagtgtctgtctcattgttcccttttcccagaagctgaaacaaatctgttttttttttttttgttttgtttctgtgaatcttcagatcttgatctgagagaccctacagattctcttagtgttttggttcactggaatgatcaaggatctagttatgtagaaatttcttag

SEQ ID NO: 738 - protein, 97 aa, Arabidopsis thaliana
SFDFYNQISSNCSTKVYSFTITICSLPRSFSPLFFLSHCYLQCLSHCSLFPEAETNLFFFFLFCFCESSDLDLRDPTDSLSVLVHWNDQGSSYVEIS

SEQ ID NO: 739 - DNA, 150 bp, Arabidopsis thaliana
  source 1..150: mol_type = genomic DNA
taaacgtcgacgagtggagtccttggcgcgatcaagattcaaaagaaattcggggactactactactcaagactaaataagataggaaatgggttgatacaaagaagttgtccttttaagaattccatcactaggagttggaaagtctga

SEQ ID NO: 740 - protein, 48 aa, Arabidopsis thaliana
TSTSGVLGAIKIQKKFGDYYYSRLNKIGNGLIQRSCPFKNSITRSWKV

SEQ ID NO: 741 - DNA, 60 bp, Arabidopsis thaliana
  source 1..60: mol_type = genomic DNA
tgaagaagaaaaaacaacaacaacaagtcagccatggagaaagagagaagaagtagatag

SEQ ID NO: 742 - protein, 18 aa, Arabidopsis thaliana
RRKNNNNKSAMEKERRSR

SEQ ID NO: 743 - DNA, 54 bp, Arabidopsis thaliana
  source 1..54: mol_type = genomic DNA
taaattgctcaattctctcggccacaggtaagcttcttcgacttcactctttga

SEQ ID NO: 744 - protein, 16 aa, Arabidopsis thaliana
IAQFSRPQVSFFDFTL

SEQ ID NO: 745 - DNA, 57 bp, Arabidopsis thaliana
  source 1..57: mol_type = genomic DNA
tgagaggacttagcgtgcatgggaacatttatagacagacgaaattctccgaattga

SEQ ID NO: 746 - protein, 17 aa, Arabidopsis thaliana
EDLACMGTFIDRRNSPN

SEQ ID NO: 747 - DNA, 57 bp, Arabidopsis thaliana; identical to SEQ ID NO: 745
  source 1..57: mol_type = genomic DNA

SEQ ID NO: 748 - protein, 17 aa, Arabidopsis thaliana
EDLACMGTFIDRRNSPN

SEQ ID NO: 749 - DNA, 72 bp, Arabidopsis thaliana
  source 1..72: mol_type = genomic DNA
tgactgaaggatatgttgaagctgctgagaaattccaaagggagtctggaaccaaacgtatcctttttctga

SEQ ID NO: 750 - protein, 22 aa, Arabidopsis thaliana
LKDMLKLLRNSKGSLEPNVSFF

SEQ ID NO: 751 - DNA, 72 bp, Arabidopsis thaliana; identical to SEQ ID NO: 749
  source 1..72: mol_type = genomic DNA

SEQ ID NO: 752 - protein, 22 aa, Arabidopsis thaliana
LKDMLKLLRNSKGSLEPNVSFF

SEQ ID NO: 753 - DNA, 183 bp, Arabidopsis thaliana
  source 1..183: mol_type = genomic DNA
tagggtttcagcagcctaattcggtctatggtttctccgatgctattgagggatctaaacggctctcttggacgtttgagaaggaagggactaaacttgagtggaggtggaaatgtaaaccatcagatgatagcaagaagatcactgttaggattttggattttcttatggaggctaacataa

SEQ ID NO: 754 - protein, 59 aa, Arabidopsis thaliana
GFSSLIRSMVSPMLLRDLNGSLGRLRRKGLNLSGGGNVNHQMIARRSLLGFWIFLWRLT

SEQ ID NO: 755 - DNA, 90 bp, Arabidopsis thaliana
  source 1..90: mol_type = genomic DNA
tgattttgtgttttggtttttcagcaaggagccaacagaccattgtggtttgcttcatcgcagagtctctcttacttggatggcaggtaa

SEQ ID NO: 756 - protein, 28 aa, Arabidopsis thaliana
FCVLVFQQGANRPLWFASSQSLSYLDGR

SEQ ID NO: 757 - DNA, 66 bp, Arabidopsis thaliana
  source 1..66: mol_type = genomic DNA
tagacagatatttggctcaaaaccagttgcgtctgcctcacagaagaagagttcctttgttgttaa

SEQ ID NO: 758 - protein, 20 aa, Arabidopsis thaliana
TDIWLKTSCVCLTEEEFLCC

SEQ ID NO: 759 - DNA, 51 bp, Arabidopsis thaliana
  source 1..51: mol_type = genomic DNA
tgatcgacgctcttattaaaaaaggtaatatttactctccctacttcttaa

SEQ ID NO: 760 - protein, 15 aa, Arabidopsis thaliana
STLLLKKVIFTLPTS

SEQ ID NO: 761 - DNA, 156 bp, Arabidopsis thaliana
  source 1..156: mol_type = genomic DNA
tgatgcagatcgccggagataagtaatctcgagtttactaatgccgcggcttccgtcgtctcgtcgcggtgtcgtgtggtttcgatggaagatactcatcactatctccaccgcattatgcatcctcgctctcttctgtatcaaccgtcagtctaa

SEQ ID NO: 762 - protein, 50 aa, Arabidopsis thaliana
CRSPEISNLEFTNAAASVVSSRCRVVSMEDTHHYLHRIMHPRSLLYQPSV

SEQ ID NO: 763 - DNA, 57 bp, Arabidopsis thaliana
  source 1..57: mol_type = genomic DNA
taaagttcaaatatatggcaccagctcaaaacccgatcagttctcaacacgtggtag

SEQ ID NO: 764 - protein, 17 aa, Arabidopsis thaliana
SSNIWHQLKTRSVLNTW

SEQ ID NO: 765 - DNA, 108 bp, Arabidopsis thaliana
  source 1..108: mol_type = genomic DNA
tgactcggaaacctcctcggatctctagacacaccggaacgaaccacgaacgggaaatctctgtatccggtacactctcgtgtaccgttgattcgtagagatctatag

SEQ ID NO: 766 - protein, 34 aa, Arabidopsis thaliana
LGNLLGSLDTPERTTNGKSLYPVHSRVPLIRRDL

SEQ ID NO: 767 - DNA, 54 bp, Arabidopsis thaliana
  source 1..54: mol_type = genomic DNA
tagatccaggttcctccgacttgtttttgtttctcgaaaacgaccaccgagtga

SEQ ID NO: 768 - protein, 16 aa, Arabidopsis thaliana
IQVPPTCFCFSKTTTE

SEQ ID NO: 769 - DNA, 108 bp, Arabidopsis thaliana; identical to SEQ ID NO: 765
  source 1..108: mol_type = genomic DNA

SEQ ID NO: 770 - protein, 34 aa, Arabidopsis thaliana; identical to SEQ ID NO: 766

SEQ ID NO: 771 - DNA, 84 bp, Arabidopsis thaliana
  source 1..84: mol_type = genomic DNA
taaacaaacaaacaaacgaagagagaagatgaaattgatttggtcaccggaaactgcatcaaaggcttacatcgacaccgttaa

SEQ ID NO: 772 - protein, 26 aa, Arabidopsis thaliana
TNKQTKREDEIDLVTGNCIKGLHRHR

SEQ ID NO: 773 - DNA, 66 bp, Arabidopsis thaliana
  source 1..66: mol_type = genomic DNA
taattcataaaggaaggctcttttttttttgtttatttcaggctcattacgttgatggtcatctaa

SEQ ID NO: 774 - protein, 20 aa, Arabidopsis thaliana
FIKEGSFFFVYFRLITLMVI

SEQ ID NO: 775 - DNA, 69 bp, Arabidopsis thaliana
  source 1..69: mol_type = genomic DNA
tgattctcctcttcttcacctttttaccaatttcctcgcttacaagattcaaagggctcattacgttga

SEQ ID NO: 776 - protein, 21 aa, Arabidopsis thaliana
FSSSSPFYQFPRLQDSKGSLR

SEQ ID NO: 777 - DNA, 120 bp, Arabidopsis thaliana
  source 1..120: mol_type = genomic DNA
taagagtctgcgatctactataagcaaactagtcgtcttttgattctcctcttcttcacctttttaccaatttcctcgcttacaagattcaaagggctcattacgttgatggtcatctaa

SEQ ID NO: 778 - protein, 38 aa, Arabidopsis thaliana
ESAIYYKQTSRLLILLFFTFLPISSLTRFKGLITLMVI

SEQ ID NO: 779 - DNA, 120 bp, Arabidopsis thaliana; identical to SEQ ID NO: 777
  source 1..120: mol_type = genomic DNA

SEQ ID NO: 780 - protein, 38 aa, Arabidopsis thaliana; identical to SEQ ID NO: 778

SEQ ID NO: 781 - DNA, 69 bp, Arabidopsis thaliana; identical to SEQ ID NO: 775
  source 1..69: mol_type = genomic DNA

SEQ ID NO: 782 - protein, 21 aa, Arabidopsis thaliana
FSSSSPFYQFPRLQDSKGSLR

SEQ ID NO: 783 - DNA, 60 bp, Arabidopsis thaliana
  source 1..60: mol_type = genomic DNA
tgattactgggtaattttaaaaccgccattgttgttctctttactacttttgggaattag

SEQ ID NO: 784 - protein, 18 aa, Arabidopsis thaliana
LLGNFKTAIVVLFTTFGN

SEQ ID NO: 785 - DNA, 75 bp, Arabidopsis thaliana
  source 1..75: mol_type = genomic DNA
tagaaacaaaaatctatggtttttaacttttcatgtttattcagtctctccatcatcacaaagctgagtgcttga

SEQ ID NO: 786 - protein, 23 aa, Arabidopsis thaliana
KQKSMVFNFSCLFSLSIITKLSA

SEQ ID NO: 787 - DNA, 60 bp, Arabidopsis thaliana
  source 1..60: mol_type = genomic DNA
taaatctctcatatccgccgccgtctttgcctcattttcaacaccggtgatgacgtgtaa

SEQ ID NO: 788 - protein, 18 aa, Arabidopsis thaliana
ISHIRRRLCLIFNTGDDV

SEQ ID NO: 789 - DNA, 75 bp, Arabidopsis thaliana
  source 1..75: mol_type = genomic DNA
taaaagaaccctaaatctctcatatccgccgccgtctttgcctcattttcaacaccggtgatgacgtgtaaatag

SEQ ID NO: 790 - protein, 23 aa, Arabidopsis thaliana
KNPKSLISAAVFASFSTPVMTCK

SEQ ID NO: 791 - DNA, 75 bp, Arabidopsis thaliana; identical to SEQ ID NO: 789
  source 1..75: mol_type = genomic DNA

SEQ ID NO: 792 - protein, 23 aa, Arabidopsis thaliana
KNPKSLISAAVFASFSTPVMTCK

SEQ ID NO: 793 - DNA, 129 bp, Arabidopsis thaliana
  source 1..129: mol_type = genomic DNA
taattttggtttgtgagcaactttcgaatcagctctgttagatttgatttgaacttttatttgaagatggatcggtgtgacacctcaggatttgtaagcggcggtggagatgcttataaggtcttctaa

SEQ ID NO: 794 - protein, 41 aa, Arabidopsis thaliana
FWFVSNFRISSVRFDLNFYLKMDRCDTSGFVSGGGDAYKVF

SEQ ID NO: 795 - DNA, 102 bp, Arabidopsis thaliana
  source 1..102: mol_type = genomic DNA
tgaggagtttttttttggttgagaaatggcttcgaaaaggatcttgaaagagctcaaggatctccagaaggatcctccaacttcctgcagtgctgtggataa

SEQ ID NO: 796 - protein, 32 aa, Arabidopsis thaliana
GVFFWLRNGFEKDLERAQGSPEGSSNFLQCCG

SEQ ID NO: 797 - DNA, 123 bp, Arabidopsis thaliana
  source 1..123: mol_type = genomic DNA
tgagggtttggttttttggatctaggagtttttttttggttgagaaatggcttcgaaaaggatcttgaaagagctcaaggatctccagaaggatcctccaacttcctgcagtgctgtggataa

SEQ ID NO: 798 - protein, 39 aa, Arabidopsis thaliana
GFGFLDLGVFFWLRNGFEKDLERAQGSPEGSSNFLQCCG

SEQ ID NO: 799 - DNA, 219 bp, Arabidopsis thaliana
  source 1..219: mol_type = genomic DNA
tgaatggaggagatgctcttcttcttctatccaataacaataataagagacacgacgctgacacaaacgcagaaccatctcaccaccgtcatcatctcggagatggccgccacactcctctgttcccgatctcgattccgatcggcgatcgactcctattgcttcgcccgtgaggccttctccgatccaatctccttccatctcctcacccttctgtaa

SEQ ID NO: 800 - protein, 71 aa, Arabidopsis thaliana
MEEMLFFFYPITIIRDTTLTQTQNHLTTVIISEMAATLLCSRSRFRSAIDSYCFAREAFSDPISFHLLTLL

SEQ ID NO: 801 - DNA, 93 bp, Arabidopsis thaliana
  source 1..93: mol_type = genomic DNA
tagcgtttaataacgccttcctctctgcgagttcgagttgagtcgcatggtggtggtggtgatgatgaagttgatgaggttgttgttgattag

SEQ ID NO: 802 - protein, 29 aa, Arabidopsis thaliana
RLITPSSLRVRVESHGGGGDDEVDEVVVD

SEQ ID NO: 803 - DNA, 90 bp, Arabidopsis thaliana
  source 1..90: mol_type = genomic DNA
taacgccttcctctctgcgagttcgagttgagtcgcatggtggtggtggtgatgatgaagttgatgaggttgttgttgattagagtttaa

SEQ ID NO: 804 - protein, 28 aa, Arabidopsis thaliana
RLPLCEFELSRMVVVVMMKLMRLLLIRV

SEQ ID NO: 805 - DNA, 303 bp, Arabidopsis thaliana
  source 1..303: mol_type = genomic DNA
taattcattcaccacaggcatgaacacttattccccactccaactcataccgacgcctattcatctcaaatcctcacgcgccgcctcaccgtcatcattacgcgtcgcttctccgttaattatacgcgccgcctcctcagacgactcacagtcagtcgaaaaccaaactctagaagtcctcgaatggcgtgccctctgcaatcagctctctccgttcgcttccacaaccatgggcctttccgccaccaaaaacgccgaaattccggtgggaaactcgccggaagaaagcaggaatctccttaa

SEQ ID NO: 806 - protein, 99 aa, Arabidopsis thaliana
FIHHRHEHLFPTPTHTDAYSSQILTRRLTVIITRRFSVNYTRRLLRRLTVSRKPNSRSPRMACPLQSALSVRFHNHGPFRHQKRRNSGGKLAGRKQESP

SEQ ID NO: 807 - DNA, 204 bp, Arabidopsis thaliana
  source 1..204: mol_type = genomic DNA
taaacttttgtgaccacccaaaaaaaaaaacgtaacggaacaaaaaaaaaaatgctccgatcacggaattgtaagatctccgccgcgaacgaagccgttatttctaatcgtctttcaatttctaatctcaaagttttattcgtttttgaatcctcgccattgaataatttgattaatcgtttttccgataagcttcgtcgttga

SEQ ID NO: 808 - protein, 66 aa, Arabidopsis thaliana
TFVTTQKKKRNGTKKKMLRSRNCKISAANEAVISNRLSISNLKVLFVFESSPLNNLINRFSDKLRR

SEQ ID NO: 809 - DNA, 63 bp, Arabidopsis thaliana
  source 1..63: mol_type = genomic DNA
taaatcatcccaaccggtgaagcttcagagctcagatgttctcgattgtcctacttgttgtga

SEQ ID NO: 810 - protein, 19 aa, Arabidopsis thaliana
IIPTGEASELRCSRLSYLL

SEQ ID NO: 811 - DNA, 90 bp, Arabidopsis thaliana
  source 1..90: mol_type = genomic DNA
tagacaacaaaatataaaaaattttttttttttttttttttttcatatgagagtaaattagtatattttcatttttatttttctcgttaa

SEQ ID NO: 812 - protein, 28 aa, Arabidopsis thaliana
TTKYKKFFFFFFFSYESKLVYFHFYFSR

SEQ ID NO: 813 - DNA, 237 bp, Arabidopsis thaliana
  source 1..237: mol_type = genomic DNA
tgactcttcttccctagcatgacctttattgatacagagatgtgtatgagaagaaacaacatcaatttaacaacagtcatagattctaacgaagccattggtatggaacatgaattagattctgctagacatcaatattcttcagtgctcactgcaattccattcttctccgctacattgtttattcctctctctttgaaaatcactatacgtgacgggtttcacgaaagtctttaa

SEQ ID NO: 814 - protein, 77 aa, Arabidopsis thaliana
LFFPSMTFIDTEMCMRRNNINLTTVIDSNEAIGMEHELDSARHQYSSVLTAIPFFSATLFIPLSLKITIRDGFHESL

SEQ ID NO: 815 - DNA, 237 bp, Arabidopsis thaliana; identical to SEQ ID NO: 813
  source 1..237: mol_type = genomic DNA

SEQ ID NO: 816 - protein, 77 aa, Arabidopsis thaliana; identical to SEQ ID NO: 814

SEQ ID NO: 817 - DNA, 72 bp, Arabidopsis thaliana
  source 1..72: mol_type = genomic DNA
tagatggcgatttcaaatgagatcgaaaccgccattaacgagaccttccataaacgtatcatcaaactctga

SEQ ID NO: 818 - protein, 22 aa, Arabidopsis thaliana
MAISNEIETAINETFHKRIIKL

SEQ ID NO: 819 - DNA, 351 bp, Arabidopsis thaliana
  source 1..351: mol_type = genomic DNA
taaaagtgttgcaggcgattgttttgtttatcttgttttgggtttggttgtcttggatgggaggaagtagctctaaagagtcacctagaggaggtggaagtggtcgtaggtatgaacgtagtgtgtctgggagctcatcttattcgtctgcttgggaccagagcagctattatcagacaccaaaccatccatctgcgtctcctgtttcatcctataattctgggagacaaacaccgaagaatcttgagaggaagtattcacggattgctgataactaccgttccattgatgaggttaccgctgctctttcacatgccggtttggagtcctcgaatctcattgttggtatag

SEQ ID NO: 820 - protein, 115 aa, Arabidopsis thaliana
KCCRRLFCLSCFGFGCLGWEEVALKSHLEEVEVVVGMNVVCLGAHLIRLLGTRAAIIRHQTIHLRLLFHPIILGDKHRRILRGSIHGLLITTVPLMRLPLLFHMPVWSPRISLLV

SEQ ID NO: 821 - DNA, 57 bp, Arabidopsis thaliana
  source 1..57: mol_type = genomic DNA
taaagtagatcgctctgttttcttttgttttctgatctctctttagtctttgaatga

SEQ ID NO: 822 - protein, 17 aa, Arabidopsis thaliana
SRSLCFLLFSDLSLVFE

SEQ ID NO: 823 - DNA, 72 bp, Arabidopsis thaliana
  source 1..72: mol_type = genomic DNA
tgactcagaagcggaaacggagacccgccgggacaccgggtatttaacaattttcttatcaagaattactag

SEQ ID NO: 824 - protein, 22 aa, Arabidopsis thaliana
LRSGNGDPPGHRVFNNFLIKNY

SEQ ID NO: 825 - DNA, 54 bp, Arabidopsis thaliana
  source 1..54: mol_type = genomic DNA
taaagttccaagctttatccatggcgtaagatgattcaccttctcaaagtttga

SEQ ID NO: 826 - protein, 16 aa, Arabidopsis thaliana
SSKLYPWRKMIHLLKV

SEQ ID NO: 827 - DNA, 108 bp, Arabidopsis thaliana
  source 1..108: mol_type = genomic DNA
taatctaatccgattttgtccttaacaaaacccaaacttgtttcgtgtttggtacaaaggaagatgttgagaaaccgacttgagttcttcttcttcttctactcataa

SEQ ID NO: 828 - protein, 34 aa, Arabidopsis thaliana
SNPILSLTKPKLVSCLVQRKMLRNRLEFFFFFYS

SEQ ID NO: 829 - DNA, 270 bp, Arabidopsis thaliana
  source 1..270: mol_type = genomic DNA
tgatttatgtcggctgggtttgaatcgactgtgattttgtctttgattcatatctcttctccgatttcatcatcatcttccccatcatcgtcgtctttgaaatcttgtcttctcaacgctcttcacttctgctgtaataagcagaggcttgttctggagactccttctctttccatgcgcttaagacccaaaaggacttgttctagtgttgaagtctttgggggttttcacataaagcagcaaaagttttcttttttcatagttcgctga

SEQ ID NO: 830 - protein, 88 aa, Arabidopsis thaliana
FMSAGFESTVILSLIHISSPISSSSSPSSSSLKSCLLNALHFCCNKQRLVLETPSLSMRLRPKRTCSSVEVFGGFHIKQQKFSFFIVR

SEQ ID NO: 831 - DNA, 270 bp, Arabidopsis thaliana; identical to SEQ ID NO: 829
  source 1..270: mol_type = genomic DNA

SEQ ID NO: 832 - protein, 88 aa, Arabidopsis thaliana; identical to SEQ ID NO: 830

SEQ ID NO: 833 - DNA, 81 bp, Arabidopsis thaliana
  source 1..81: mol_type = genomic DNA
taatccttgaatactttggctatggcggtgtttatgtttaatgatcaaaaagctctgttttttatgcaagcgtgggtataa

SEQ ID NO: 834 - protein, 25 aa, Arabidopsis thaliana
SLNTLAMAVFMFNDQKALFFMQAWV

SEQ ID NO: 835 - DNA, 81 bp, Arabidopsis thaliana; identical to SEQ ID NO: 833
  source 1..81: mol_type = genomic DNA

SEQ ID NO: 836 - protein, 25 aa, Arabidopsis thaliana
SLNTLAMAVFMFNDQKALFFMQAWV

SEQ ID NO: 837 - DNA, 201 bp, Arabidopsis thaliana
  source 1..201: mol_type = genomic DNA
tgaccccaaacagtatctgcttcgacgtcacctctcaccttattccttcgattccccatttttcacttttcttatattttctccacctctctgtctcttttgcttgcttcctatacacagttcttctctgttcctctaatcgggtttgaatcttttcgtcaatttctatctgggttttgtgttaatcgaaggaataagtga

SEQ ID NO: 838 - protein, 65 aa, Arabidopsis thaliana
PQTVSASTSPLTLFLRFPIFHFSYIFSTSLSLLLASYTQFFSVPLIGFESFRQFLSGFCVNRRNK

SEQ ID NO: 839 - DNA, 78 bp, Arabidopsis thaliana
  source 1..78: mol_type = genomic DNA
taacctctctatctctctctaagtatcagcaaaaaaacagagatttatagagagagaaaaaaactatggctcacataa

SEQ ID NO: 840 - protein, 24 aa, Arabidopsis thaliana
PLYLSLSISKKTEIYRERKKLWLT

SEQ ID NO: 841 - DNA, 93 bp, Arabidopsis thaliana
  source 1..93: mol_type = genomic DNA
taaattctagggttttgcaaaaccaacaccgaacggatccaacacgatgggacgaagacctgcgagatgttaccgtcagtaatgtctgattga

SEQ ID NO: 842 - protein, 29 aa, Arabidopsis thaliana
ILGFCKTNTERIQHDGTKTCEMLPSVMSD

SEQ ID NO: 843 - DNA, 156 bp, Arabidopsis thaliana
  source 1..156: mol_type = genomic DNA
taatgcatggtcaaaatgatagagacgtttgaccaactccgaaacatacacaatccaaacaaaatcaaaaaagaaaaatctccggacctgatcctattcctaattcagtccgtctttatcattttgcaaagatcatcggatcactctttgttataa

SEQ ID NO: 844 - protein, 50 aa, Arabidopsis thaliana
CMVKMIETFDQLRNIHNPNKIKKEKSPDLILFLIQSVFIILQRSSDHSLL

SEQ ID NO: 845 - DNA, 75 bp, Arabidopsis thaliana
  source 1..75: mol_type = genomic DNA
tagggttttgcaaaaccaacaccgaacggatccaacacgatgggacgaagacctgcgagatgttaccgtcagtaa

SEQ ID NO: 846 - protein, 23 aa, Arabidopsis thaliana
GFAKPTPNGSNTMGRRPARCYRQ

SEQ ID NO: 847 - DNA, 66 bp, Arabidopsis thaliana
  source 1..66: mol_type = genomic DNA
tgaataaatattcttaaagaaatgatttttataatcttcttctcgtcgactttatttattatttag

SEQ ID NO: 848 - protein, 20 aa, Arabidopsis thaliana
INILKEMIFIIFFSSTLFII

SEQ ID NO: 849 - DNA, 87 bp, Arabidopsis thaliana
  source 1..87: mol_type = genomic DNA
taacaaagagaaagtgtctgtatgttgtgcccactctctacatttatcaatcacttcatgtgtgttaccttgattgcaaaaaagtga

SEQ ID NO: 850 - protein, 27 aa, Arabidopsis thaliana
QRESVCMLCPLSTFINHFMCVTLIAKK

SEQ ID NO: 851 - DNA, 108 bp, Arabidopsis thaliana
  source 1..108: mol_type = genomic DNA
taactcaatattttatctcccccaaagtccaattttccaaaaaatccaaaacacacagagagaaaaaaaactgaaacatcccaaatggatcatcatcttcaaccataa

SEQ ID NO: 852 - protein, 34 aa, Arabidopsis thaliana
LNILSPPKSNFPKNPKHTERKKTETSQMDHHLQP

SEQ ID NO: 853 - DNA, 108 bp, Arabidopsis thaliana
  source 1..108: mol_type = genomic DNA
taagtattctcattctacttctctctgggattgtatcttcagctccttcagctaattctcctgcaaagattcttaatgggtttatctcaaatcatggctcttcactaa

SEQ ID NO: 854 - protein, 34 aa, Arabidopsis thaliana
VFSFYFSLGLYLQLLQLILLQRFLMGLSQIMALH

SEQ ID NO: 855 - DNA, 99 bp, Arabidopsis thaliana
  source 1..99: mol_type = genomic DNA
taatgggtttatctcaaatcatggctcttcactaatgaaatggttatggtcactcaaaaccacaaccaaaacaagttcgaatcctcttccattttctga

SEQ ID NO: 856 - protein, 31 aa, Arabidopsis thaliana
WVYLKSWLFTNEMVMVTQNHNQNKFESSSIF

SEQ ID NO: 857 - DNA, 84 bp, Arabidopsis thaliana
  source 1..84: mol_type = genomic DNA
taaattagaataattgcgacacagatctaccagcaatttcgaccgttgcaacaaagccatgattcaaaaagtttgcttttttaa

SEQ ID NO: 858 - protein, 26 aa, Arabidopsis thaliana
IRIIATQIYQQFRPLQQSHDSKSLLF

SEQ ID NO: 859 - DNA, 93 bp, Arabidopsis thaliana
  source 1..93: mol_type = genomic DNA
taattgcgacacagatctaccagcaatttcgaccgttgcaacaaagccatgattcaaaaagtttgcttttttaatcttaccgttggctcctag

SEQ ID NO: 860 - protein, 29 aa, Arabidopsis thaliana
LRHRSTSNFDRCNKAMIQKVCFFNLTVGS

SEQ ID NO: 861 - DNA, 99 bp, Arabidopsis thaliana
  source 1..99: mol_type = genomic DNA
taacgacgatgcaaatatactatatattacataggcttcaccagatcatctcgaatcttaatcacattattaatacaattacatagaaggagcaattaa

SEQ ID NO: 862 - protein, 31 aa, Arabidopsis thaliana
RRCKYTIYYIGFTRSSRILITLLIQLHRRSN

SEQ ID NO: 863 - DNA, 204 bp, Arabidopsis thaliana
  source 1..204: mol_type = genomic DNA
tgaatcgtttgtgaatggtggaaactaatccgatcggtggtaagtttacgctctccctttccatcaaaagggcgagcttttctcttcctctctcgacatcctctgttttcgctttcggatcttgcaaagaaggctggtactttcgctgccttggcctcgacccgtgaacgattcgcccctaaaattcacaacccggaaccctaa

SEQ ID NO: 864 - protein, 66 aa, Arabidopsis thaliana
IVCEWWKLIRSVVSLRSPFPSKGRAFLFLSRHPLFSLSDLAKKAGTFAALASTRERFAPKIHNPEP

SEQ ID NO: 865 - DNA, 156 bp, Arabidopsis thaliana
  source 1..156: mol_type = genomic DNA
tgaatggtggaaactaatccgatcggtggtaagtttacgctctccctttccatcaaaagggcgagcttttctcttcctctctcgacatcctctgttttcgctttcggatcttgcaaagaaggctggtactttcgctgccttggcctcgacccgtga

SEQ ID NO: 866 - protein, 50 aa, Arabidopsis thaliana
MVETNPIGGKFTLSLSIKRASFSLPLSTSSVFAFGSCKEGWYFRCLGLDP

SEQ ID NO: 867 - DNA, 204 bp, Arabidopsis thaliana; identical to SEQ ID NO: 863
  source 1..204: mol_type = genomic DNA

SEQ ID NO: 868 - protein, 66 aa, Arabidopsis thaliana; identical to SEQ ID NO: 864

SEQ ID NO: 869 - DNA, 54 bp, Arabidopsis thaliana
  source 1..54: mol_type = genomic DNA
tgatcttgtggtgggacttcaagccgcgaagcgtcttttgtcttcagctactag

SEQ ID NO: 870 - protein, 16 aa, Arabidopsis thaliana
SCGGTSSREASFVFSY

SEQ ID NO: 871 - DNA, 102 bp, Arabidopsis thaliana
  source 1..102: mol_type = genomic DNA
tagctttctcttcttcagaaggtggtctttgggcttttgtccgtttatggcctgttatatggctttgtaaaatatggcttgttaaaaggctttgtaatataa

SEQ ID NO: 872 - protein, 32 aa, Arabidopsis thaliana
LSLLQKVVFGLLSVYGLLYGFVKYGLLKGFVI

SEQ ID NO: 873 - DNA, 78 bp, Arabidopsis thaliana
  source 1..78: mol_type = genomic DNA
tagcacattagctttctcttcttcagaaggtggtctttgggcttttgtccgtttatggcctgttatatggctttgtaa

SEQ ID NO: 874 - protein, 24 aa, Arabidopsis thaliana
HISFLFFRRWSLGFCPFMACYMAL

SEQ ID NO: 875 - DNA, 309 bp, Arabidopsis thaliana
  source 1..309: mol_type = genomic DNA
tgagaacgagaaggagagatctgtgtttcattagagatgagcaagctcagattcttccaaagtctcctaatttcgactgtgatctgctttttcctcccgtcgatcaacgctagaggcggccactccgaccatatccacccaggtgatgggaattatagttttcatggtattgtgaggcacttatttgctcaagaagagcctacaccgagtttggaattaactcgaggatatatgactaatgatgatcttgagaaagcaatgaaggatttcaccaagagatgtagtaagatttcgagattatacaggtaa

SEQ ID NO: 876 - protein, 101 aa, Arabidopsis thaliana
EREGEICVSLEMSKLRFFQSLLISTVICFFLPSINARGGHSDHIHPGDGNYSFHGIVRHLFAQEEPTPSLELTRGYMTNDDLEKAMKDFTKRCSKISRLYR

SEQ ID NO: 877 - DNA, 60 bp, Arabidopsis thaliana
  source 1..60: mol_type = genomic DNA
tagggttcatcactgaaatcaaaaatgcaattaaatctctacaaaatctctcagatctaa

SEQ ID NO: 878 - protein, 18 aa, Arabidopsis thaliana
GSSLKSKMQLNLYKISQI

SEQ ID NO: 879 - DNA, 183 bp, Arabidopsis thaliana
  source 1..183: mol_type = genomic DNA
tagcaattagctttcaaatctcatctctttattctctctctctatctcttctcctcaagaaccctaaaaatctccagaaaaaagatcccaaatttcgtatttcaacgatctgaatctctctctctttcgggtttattttgtttcccgatatggtttagaatttgtgatttaaatggaagctga

SEQ ID NO: 880 - protein, 59 aa, Arabidopsis thaliana
QLAFKSHLFILSLYLFSSRTLKISRKKIPNFVFQRSESLSLSGLFCFPIWFRICDLNGS

SEQ ID NO: 881 - DNA, 120 bp, Arabidopsis thaliana
  source 1..120: mol_type = genomic DNA
taggtgagtcaacagctgcagcggcagcgaatgtcaatgcttggactggaacggtggcgtttctgccgcttctcgggggctttctcgctgactcgtatctcggtcgtttccgtactataa

SEQ ID NO: 882 - protein, 38 aa, Arabidopsis thaliana
VSQQLQRQRMSMLGLERWRFCRFSGAFSLTRISVVSVL

SEQ ID NO: 883 - DNA, 66 bp, Arabidopsis thaliana
  source 1..66: mol_type = genomic DNA
tgactcgtatctcggtcgtttccgtactataatcatctcatcttctctctatatcttggtagataa

SEQ ID NO: 884 - protein, 20 aa, Arabidopsis thaliana
LVSRSFPYYNHLIFSLYLGR

SEQ ID NO: 885 - DNA, 96 bp, Arabidopsis thaliana
  source 1..96: mol_type = genomic DNA
taatatactctgttttttgcaatgattttgttttgtgaaatttttctcggagaagaaagtaatttagaagacggagagtggcaaaacgaaatataa

SEQ ID NO: 886 - protein, 30 aa, Arabidopsis thaliana
YTLFFAMILFCEIFLGEESNLEDGEWQNEI

SEQ ID NO: 887 - DNA, 63 bp, Arabidopsis thaliana
  source 1..63: mol_type = genomic DNA
taatttagaagacggagagtggcaaaacgaaatataaaaaaaaaagttttcaatttcttttaa

SEQ ID NO: 888 - protein, 19 aa, Arabidopsis thaliana
FRRRRVAKRNIKKKVFNFF

SEQ ID NO: 889 - DNA, 57 bp, Arabidopsis thaliana
  source 1..57: mol_type = genomic DNA
tgaactactactagtgtttttttccgtgaagtaaagagaaacgaaacagagacataa

SEQ ID NO: 890 - protein, 17 aa, Arabidopsis thaliana
TTTSVFFREVKRNETET

SEQ ID NO: 891 - DNA, 57 bp, Arabidopsis thaliana
  source 1..57: mol_type = genomic DNA
tgaaaccattgcttagagtattcgaagaagaagatgaaaacaattgatttctcctaa

SEQ ID NO: 892 - protein, 17 aa, Arabidopsis thaliana
NHCLEYSKKKMKTIDFS

SEQ ID NO: 893 - DNA, 117 bp, Arabidopsis thaliana
  source 1..117: mol_type = genomic DNA
tagtgtatgaataaagcggcatttgggtcgctgacaaaaacttatttggagcaaggattcttcaacatcatgaaaccattgcttagagtattcgaagaagaagatgaaaacaattga

SEQ ID NO: 894 - protein, 37 aa, Arabidopsis thaliana
CMNKAAFGSLTKTYLEQGFFNIMKPLLRVFEEEDENN

SEQ ID NO: 895 - DNA, 57 bp, Arabidopsis thaliana; identical to SEQ ID NO: 891
  source 1..57: mol_type = genomic DNA

SEQ ID NO: 896 - protein, 17 aa, Arabidopsis thaliana
NHCLEYSKKKMKTIDFS

SEQ ID NO: 897 - DNA, 117 bp, Arabidopsis thaliana; identical to SEQ ID NO: 893
  source 1..117: mol_type = genomic DNA

SEQ ID NO: 898 - protein, 37 aa, Arabidopsis thaliana; identical to SEQ ID NO: 894

SEQ ID NO: 899 - DNA, 57 bp, Arabidopsis thaliana; identical to SEQ ID NO: 891
  source 1..57: mol_type = genomic DNA

SEQ ID NO: 900 - protein, 17 aa, Arabidopsis thaliana
NHCLEYSKKKMKTIDFS

SEQ ID NO: 901 - DNA, 117 bp, Arabidopsis thaliana; identical to SEQ ID NO: 893
  source 1..117: mol_type = genomic DNA

SEQ ID NO: 902 - protein, 37 aa, Arabidopsis thaliana; identical to SEQ ID NO: 894

SEQ ID NO: 903 - DNA, 120 bp, Arabidopsis thaliana
  source 1..120: mol_type = genomic DNA
taatcggttctgttttcgaagatgttgttgttagagttagatccgcatggttttggtgatcgttttggatcgaagacgtggttccacagacgcaaaaaatgccgtcgtctcttgctttga

SEQ ID NO: 904 - protein, 38 aa, Arabidopsis thaliana
SVLFSKMLLLELDPHGFGDRFGSKTWFHRRKKCRRLLL

SEQ ID NO: 905 - DNA, 54 bp, Arabidopsis thaliana
  source 1..54: mol_type = genomic DNA
tagaaatttgcggcgaggttaggaaaagttgtacagatagagattgagctctga

SEQ ID NO: 906 - protein, 16 aa, Arabidopsis thaliana
KFAARLGKVVQIEIEL

SEQ ID NO: 907 - DNA, 51 bp, Arabidopsis thaliana
  source 1..51: mol_type = genomic DNA
taaatagaaatttgcggcgaggttaggaaaagttgtacagatagagattga

SEQ ID NO: 908 - protein, 15 aa, Arabidopsis thaliana
IEICGEVRKSCTDRD

SEQ ID NO: 909 - DNA, 78 bp, Arabidopsis thaliana
  source 1..78: mol_type = genomic DNA
tgatcgttttggatcgaagacgtggttccacagacgcaaaaaatgccgtcgtctcttgctttgagatttggcttctga

SEQ ID NO: 910 - protein, 24 aa, Arabidopsis thaliana
SFWIEDVVPQTQKMPSSLALRFGF

SEQ ID NO: 911 - DNA, 93 bp, Arabidopsis thaliana
  source 1..93: mol_type = genomic DNA
taattaagagcacttaagacaataattaacccagaaggagaagctggtgtagtggtggttctcatggcgatgttggtttcccaggaaaggtaa

SEQ ID NO: 912 - protein, 29 aa, Arabidopsis thaliana
LRALKTIINPEGEAGVVVVLMAMLVSQER

SEQ ID NO: 913 - DNA, 87 bp, Arabidopsis thaliana
  source 1..87: mol_type = genomic DNA
tgatgtggtgattgtatccgtcaggtttctatgatacagtatgcaaacccggcattagttcaccggaaccgatgtctcccggtttag

SEQ ID NO: 914 - protein, 27 aa, Arabidopsis thaliana
CGDCIRQVSMIQYANPALVHRNRCLPV

SEQ ID NO: 915 - DNA, 51 bp, Arabidopsis thaliana
  source 1..51: mol_type = genomic DNA
tgacagtggtgtaaatggtccattagtagtttgtggttgggtgaaaagtaa

SEQ ID NO: 916 - protein, 15 aa, Arabidopsis thaliana
QWCKWSISSLWLGEK

SEQ ID NO: 917 - DNA, 72 bp, Arabidopsis thaliana
  source 1..72: mol_type = genomic DNA
taaaatttgaacctttttttttttttggtgtgttgctctgttgggtttgtgttaatggtgacagtggtgtaa

SEQ ID NO: 918 - protein, 22 aa, Arabidopsis thaliana
NLNLFFFLVCCSVGFVLMVTVV

SEQ ID NO: 919 - DNA, 63 bp, Arabidopsis thaliana
  source 1..63: mol_type = genomic DNA
taaaccatgtttcaacaaactacttcatatctcaatcattcaatattcttgaagagactttga

SEQ ID NO: 920 - protein, 19 aa, Arabidopsis thaliana
TMFQQTTSYLNHSIFLKRL

SEQ ID NO: 921 - DNA, 111 bp, Arabidopsis thaliana
  source 1..111: mol_type = genomic DNA
taaaacaaaaaaaacttagaagagaaacaatctcatcgctcagtgactgattcagatgaccagtgtctccgtcgccgtcgtagctcctccgcatcgttgcccattctctag

SEQ ID NO: 922 - protein, 35 aa, Arabidopsis thaliana
NKKNLEEKQSHRSVTDSDDQCLRRRRSSSASLPIL

SEQ ID NO: 923 - DNA, 108 bp, Arabidopsis thaliana
  source 1..108: mol_type = genomic DNA
tgaatttgttgtttatttaatttgttcaacgattatcctctcaaatcctttcactatcatcttttccttattcttcttcttcttcttcctcttcatcggccattataa

SEQ ID NO: 924 - protein, 34 aa, Arabidopsis thaliana
ICCLFNLFNDYPLKSFHYHLFLILLLLLPLHRPL

SEQ ID NO: 925 - DNA, 123 bp, Arabidopsis thaliana
  source 1..123: mol_type = genomic DNA
tgaatatggaaggtgcgtcattctcgttatagttttaatggtggttactgtttgatgatggagaaagaaaaaaagaaagcttttaaagttatctcttccaaattattgcaaacacatcattga

SEQ ID NO: 926 - protein, 39 aa, Arabidopsis thaliana
IWKVRHSRYSFNGGYCLMMEKEKKKAFKVISSKLLQTHH

SEQ ID NO: 927 - DNA, 75 bp, Arabidopsis thaliana
  source 1..75: mol_type = genomic DNA
tgatggagaaagaaaaaaagaaagcttttaaagttatctcttccaaattattgcaaacacatcattgaggcataa

SEQ ID NO: 928 - protein, 23 aa, Arabidopsis thaliana
WRKKKRKLLKLSLPNYCKHIIEA

SEQ ID NO: 929 - DNA, 63 bp, Arabidopsis thaliana
  source 1..63: mol_type = genomic DNA
taggacaacaaacttctcagacaaaaggggcacacatgttctagtgttctgtttatggtttag

SEQ ID NO: 930 - protein, 19 aa, Arabidopsis thaliana
DNKLLRQKGHTCSSVLFMV

SEQ ID NO: 931 - DNA, 171 bp, Arabidopsis thaliana
  source 1..171: mol_type = genomic DNA
tgaaaggcgtttcagagtcaccatgttttacgacgcgtgtctctttttcagccggttttcttctcgctggttacatcagagcttcggagatattatataactcaacgacgtagctgttgcattttttgtttttgcaatgatcttcatcttcatgaccggataaactcttag

SEQ ID NO: 932 - protein, 55 aa, Arabidopsis thaliana
KAFQSHHVLRRVSLFQPVFFSLVTSELRRYYITQRRSCCIFCFCNDLHLHDRINS

SEQ ID NO: 933 - DNA, 66 bp, Arabidopsis thaliana
  source 1..66: mol_type = genomic DNA
taactcaacgacgtagctgttgcattttttgtttttgcaatgatcttcatcttcatgaccggataa

SEQ ID NO: 934 - protein, 20 aa, Arabidopsis thaliana
LNDVAVAFFVFAMIFIFMTG

SEQ ID NO: 935 - DNA, 72 bp, Arabidopsis thaliana
  source 1..72: mol_type = genomic DNA
taaagagaaagattcaaagaaggaaagaaattgaggatgactatttcaagtccaaagagagattttgagtag

SEQ ID NO: 936 - protein, 22 aa, Arabidopsis thaliana
RERFKEGKKLRMTISSPKRDFE

SEQ ID NO: 937 - DNA, 84 bp, Arabidopsis thaliana
  source 1..84: mol_type = genomic DNA
taagaagccaaaaaaataaagagaaagattcaaagaaggaaagaaattgaggatgactatttcaagtccaaagagagattttga

SEQ ID NO: 938 - protein, 26 aa, Arabidopsis thaliana
EAKKIKRKIQRRKEIEDDYFKSKERF

SEQ ID NO: 939 - DNA, 111 bp, Arabidopsis thaliana
  source 1..111: mol_type = genomic DNA
tgagacatgcatcaaactctctcttctcctgccatggcgtcaaacctccggaaaccctatttcctcaggtacttaactattcttccccaatcgatgatggtcgaaagctga

SEQ ID NO: 940 - protein, 35 aa, Arabidopsis thaliana
DMHQTLSSPAMASNLRKPYFLRYLTILPQSMMVES

SEQ ID NO: 941 - DNA, 69 bp, Arabidopsis thaliana
  source 1..69: mol_type = genomic DNA
taaaggactgtggtgaatggtgagtgtgacttggagggaccccatcaccgcaacaatacagcttcttag

SEQ ID NO: 942 - protein, 21 aa, Arabidopsis thaliana
RTVVNGECDLEGPHHRNNTAS

SEQ ID NO: 943 - DNA, 123 bp, Arabidopsis thaliana
  source 1..123: mol_type = genomic DNA
tagagaagagataaccaacggacaaaaataaaatctactttttcttctgatattttatctaaacaccaaagaaatgggcggcttttggtttttaaagactgttgtttttgtttctgtctgtaa

SEQ ID NO: 944 - protein, 39 aa, Arabidopsis thaliana
RRDNQRTKIKSTFSSDILSKHQRNGRLLVFKDCCFCFCL

SEQ ID NO: 945 - DNA, 72 bp, Arabidopsis thaliana
  source 1..72: mol_type = genomic DNA
taaatgagtttaaggtcctgcaaaaactgggtttttcctcgtgtacttgttcatcttatctcctctgcataa

SEQ ID NO: 946 - protein, 22 aa, Arabidopsis thaliana
MSLRSCKNWVFPRVLVHLISSA

SEQ ID NO: 947 - DNA, 75 bp, Arabidopsis thaliana
  source 1..75: mol_type = genomic DNA
taatccgatctcaaaggttggcttgttgggagcactgagacatcaaacatggtttcttctttctttcactcttaa

SEQ ID NO: 948 - protein, 23 aa, Arabidopsis thaliana
SDLKGWLVGSTETSNMVSSFFHS

SEQ ID NO: 949 - DNA, 54 bp, Arabidopsis thaliana
  source 1..54: mol_type = genomic DNA
tgagacatcaaacatggtttcttctttctttcactcttaaaaaaaccaatttag

SEQ ID NO: 950 - protein, 16 aa, Arabidopsis thaliana
DIKHGFFFLSLLKKPI

SEQ ID NO: 951 - DNA, 72 bp, Arabidopsis thaliana
  source 1..72: mol_type = genomic DNA
taaggtcctgcaaaaactgggtttttcctcgtgtacttgttcatcttatctcctctgcataaacttcattga

SEQ ID NO: 952 - protein, 22 aa, Arabidopsis thaliana
GPAKTGFFLVYLFILSPLHKLH

SEQ ID NO: 953 - DNA, 90 bp, Arabidopsis thaliana
  source 1..90: mol_type = genomic DNA
tagtcattaccacgtttgaaacatgacgacggagaaaagcaagattctggtgatcggagggactggttacatgggagaattcatcgttga

SEQ ID NO: 954 - protein, 28 aa, Arabidopsis thaliana
SLPRLKHDDGEKQDSGDRRDWLHGRIHR

SEQ ID NO: 955 - DNA, 108 bp, Arabidopsis thaliana
  source 1..108: mol_type = genomic DNA
taacgcttcttcatttttctcgagagaagcaaaactacatatatatatacgcacatacgtacacagttcgaaggttttagctgcgagtatgaggaaggaactgtgtag

SEQ ID NO: 956 - protein, 34 aa, Arabidopsis thaliana
RFFIFLERSKTTYIYTHIRTQFEGFSCEYEEGTV

SEQ ID NO: 957 - DNA, 111 bp, Arabidopsis thaliana
  source 1..111: mol_type = genomic DNA
tagacgcaggacccatcttgttcaatctttctccgtcgtctttctctactggttctatgttttctcataaatcagctctcctttagccctttattattatatattctataa

SEQ ID NO: 958 - protein, 35 aa, Arabidopsis thaliana
TQDPSCSIFLRRLSLLVLCFLINQLSFSPLLLYIL

SEQ ID NO: 959 - DNA, 99 bp, Arabidopsis thaliana
  source 1..99: mol_type = genomic DNA
tagactcgtctcttagacgcaggacccatcttgttcaatctttctccgtcgtctttctctactggttctatgttttctcataaatcagctctcctttag

SEQ ID NO: 960 - protein, 31 aa, Arabidopsis thaliana
TRLLDAGPILFNLSPSSFSTGSMFSHKSALL

SEQ ID NO: 961 - DNA, 168 bp, Arabidopsis thaliana
  source 1..168: mol_type = genomic DNA
tgatgtggcaaaactcttgtggatcttgatgttcaaacattcatgtctccggtgattagtgaaatccttagatctggtttaactatagactcgtctcttagacgcaggacccatcttgttcaatctttctccgtcgtctttctctactggttctatgttttctcataa

SEQ ID NO: 962 - protein, 54 aa, Arabidopsis thaliana
CGKTLVDLDVQTFMSPVISEILRSGLTIDSSLRRRTHLVQSFSVVFLYWFYVFS

SEQ ID NO: 963 - DNA, 168 bp, Arabidopsis thaliana; identical to SEQ ID NO: 961
  source 1..168: mol_type = genomic DNA

SEQ ID NO: 964 - protein, 54 aa, Arabidopsis thaliana; identical to SEQ ID NO: 962

SEQ ID NO: 965 - DNA, 111 bp, Arabidopsis thaliana; identical to SEQ ID NO: 957
  source 1..111: mol_type = genomic DNA

SEQ ID NO: 966 - protein, 35 aa, Arabidopsis thaliana; identical to SEQ ID NO: 958

SEQ ID NO: 967 - DNA, 99 bp, Arabidopsis thaliana; identical to SEQ ID NO: 959
  source 1..99: mol_type = genomic DNA

SEQ ID NO: 968 - protein, 31 aa, Arabidopsis thaliana; identical to SEQ ID NO: 960

SEQ ID NO: 969 - DNA, 84 bp, Arabidopsis thaliana
  source 1..84: mol_type = genomic DNA
taaagtttcacccaaaccgaaaaaagagagaatctgtgcatgttgctcagaaaatcttcaaagcgtaatctgggcttacgttag

SEQ ID NO: 970 - protein, 26 aa, Arabidopsis thaliana
SFTQTEKRENLCMLLRKSSKRNLGLR

SEQ ID NO: 971 - DNA, 240 bp, Arabidopsis thaliana
  source 1..240: mol_type = genomic DNA
taggattacaaacacaacaccagcttcctcctctcgacacgaccctccgtcatgtctgcgccagctatatcttctcctcgccacgtttcatcactctcttctagtatatatacacacctaaccattacctcatgtctttgccttatcactcaccaaaagtcgtcacataatatcactttcgagttatcaacatccgtacatgtcatccatagagccaaaagtaatgatggttggtgctaa

SEQ ID NO: 972 - protein, 78 aa, Arabidopsis thaliana
DYKHNTSFLLSTRPSVMSAPAISSPRHVSSLSSSIYTHLTITSCLCLITHQKSSHNITFELSTSVHVIHRAKSNDGWC

SEQ ID NO: 973 - DNA, 162 bp, Arabidopsis thaliana
  source 1..162: mol_type = genomic DNA
tgacgaagcaatggctcgtacgaagcaaactgcaagaaaatcacacggaggaaaagctccgaggactctgctcgctaccaaggcggcgaggaaatctgcgccgactactggaggagtcaagaaacctcaccgttaccgtcccggaaccgtcgctcttcgtga

SEQ ID NO: 974 - protein, 52 aa, Arabidopsis thaliana
RSNGSYEANCKKITRRKSSEDSARYQGGEEICADYWRSQETSPLPSRNRRSS

SEQ ID NO: 975 - DNA, 69 bp, Arabidopsis thaliana
  source 1..69: mol_type = genomic DNA
taacaatcaaagtgtgtgaaaatcgtaagagacctttttttgttttgcagagagatgttgaagaagtga

SEQ ID NO: 976 - protein, 21 aa, Arabidopsis thaliana
QSKCVKIVRDLFLFCREMLKK

SEQ ID NO: 977 - DNA, 273 bp, Arabidopsis thaliana
  source 1..273: mol_type = genomic DNA
taaattgtcaaagctgaggagaaagaaagctttttcggtctgaaattgaagtgcgaatcggggaatctagggtttcgagagagagataatgggtggaggaggacatggcggaggtataacttacaagggagtcactgtccacactcccaagacttggcacaccgtcaccggaaaaggcttgtgcgccgttatgtggttctggattctgtacagggcaaagcaagatggtcctgtagttatgggatggaggcacccttgggatggtcatggtga

SEQ ID NO: 978 - protein, 89 aa, Arabidopsis thaliana
IVKAEEKESFFGLKLKCESGNLGFRERDNGWRRTWRRYNLQGSHCPHSQDLAHRHRKRLVRRYVVLDSVQGKARWSCSYGMEAPLGWSW

SEQ ID NO: 979 - DNA, 306 bp, Arabidopsis thaliana
  source 1..306: mol_type = genomic DNA
tgattgcgagaatcgctgacaaaaaaatgcaattttcttgtgatcctgatcaagaaggagatgagctgccacaatatgaacacatttatcaaaatgacttctcttatcgaaagcacaagaaacaaaaggaagaagatatatctatctgcgaatgcaagtttgatttcggagaccctgacagtgcttgtggtgagagatgcctcaatgtcattaccaacactgaatgtactcctggttactgcccctgtggtgtctattgcaagaatcagaagttccaaaaatgtgaatacgccaaaacaaagttga

SEQ ID NO: 980 - protein, 100 aa, Arabidopsis thaliana
LRESLTKKCNFLVILIKKEMSCHNMNTFIKMTSLIESTRNKRKKIYLSANASLISETLTVLVVRDASMSLPTLNVLLVTAPVVSIARIRSSKNVNTPKQS

SEQ ID NO: 981 - DNA, 75 bp, Arabidopsis thaliana
  source 1..75: mol_type = genomic DNA
tgaagcatctcacttgagctctggtcctcaggaaccacagagcccctacgtggaagaattcaaacttggagatga

SEQ ID NO: 982 - protein, 23 aa, Arabidopsis thaliana
SISLELWSSGTTEPLRGRIQTWR

SEQ ID NO: 983 - DNA, 366 bp, Arabidopsis thaliana
  source 1..366: mol_type = genomic DNA
tagaagcatggcaggagctgttggaacatcaatgttagggtctcttattgtgtttacagtgatcctctcgcttcaggaaatttacagaggaaaattagcttcttcagagctgttcacgatccttggtggattcacaagctctctcctctttttgttttctctcactttcattggaaattttcaggaatcttctggcatcaagagtggttggggtgcagtcattcttgcagaaatcatagctcttatcgctgctggcacggttcatcgggtttgtatcacaacctgtttcctgttctctgctgggctattgtacgaggtgaacaagatctctggatacatgctatccaaaaccgagtcaaagtctaa

SEQ ID NO: 984 - protein, 120 aa, Arabidopsis thaliana
KHGRSCWNINVRVSYCVYSDPLASGNLQRKISFFRAVHDPWWIHKLSPLFVFSHFHWKFSGIFWHQEWLGCSHSCRNHSSYRCWHGSSGLYHNLFPVLCWAIVRGEQDLWIHAIQNRVKV

SEQ ID NO: 985 - DNA, 396 bp, Arabidopsis thaliana
  source 1..396: mol_type = genomic DNA
tgaggagaagatctgatctttagggctttcaagaagcatggcaggagctgttggaacatcaatgttagggtctcttattgtgtttacagtgatcctctcgcttcaggaaatttacagaggaaaattagcttcttcagagctgttcacgatccttggtggattcacaagctctctcctctttttgttttctctcactttcattggaaattttcaggaatcttctggcatcaagagtggttggggtgcagtcattcttgcagaaatcatagctcttatcgctgctggcacggttcatcgggtttgtatcacaacctgtttcctgttctctgctgggctattgtacgaggtgaacaagatctctggatacatgctatccaaaaccgagtcaaagtctaa

SEQ ID NO: 986 - protein, 130 aa, Arabidopsis thaliana
GEDLIFRAFKKHGRSCWNINVRVSYCVYSDPLASGNLQRKISFFRAVHDPWWIHKLSPLFVFSHFHWKFSGIFWHQEWLGCSHSCRNHSSYRCWHGSSGLYHNLFPVLCWAIVRGEQDLWIHAIQNRVKV

SEQ ID NO: 987 - DNA, 66 bp, Arabidopsis thaliana
  source 1..66: mol_type = genomic DNA
tgaccggacagatggattctgactcggaactttatatcccggcgccgtttggagattttacggtga

SEQ ID NO: 988 - protein, 20 aa, Arabidopsis thaliana
PDRWILTRNFISRRRLEILR

SEQ ID NO: 989 - DNA, 102 bp, Arabidopsis thaliana
  source 1..102: mol_type = genomic DNA
tgaaggttaagtgttactttgaccggacagatggattctgactcggaactttatatcccggcgccgtttggagattttacggtgatgcggattttgagttag

SEQ ID NO: 990 - protein, 32 aa, Arabidopsis thaliana
RLSVTLTGQMDSDSELYIPAPFGDFTVMRILS

SEQ ID NO: 991 - DNA, 66 bp, Arabidopsis thaliana; identical to SEQ ID NO: 987
  source 1..66: mol_type = genomic DNA

SEQ ID NO: 992 - protein, 20 aa, Arabidopsis thaliana
PDRWILTRNFISRRRLEILR

SEQ ID NO: 993 - DNA, 102 bp, Arabidopsis thaliana; identical to SEQ ID NO: 989
  source 1..102: mol_type = genomic DNA

SEQ ID NO: 994 - protein, 32 aa, Arabidopsis thaliana; identical to SEQ ID NO: 990

SEQ ID NO: 995 - DNA, 126 bp, Arabidopsis thaliana
  source 1..126: mol_type = genomic DNA
taaatggagaaaaggaagagagaatcatctgagagaagctttggtgaatcagagtctgtgtcttcactatctgagaaggattctgaaattcaagtaagatcaagaattttgtttttgttattttag

SEQ ID NO: 996 - protein, 40 aa, Arabidopsis thaliana
MEKRKRESSERSFGESESVSSLSEKDSEIQVRSRILFLLF

SEQ ID NO: 997 - DNA, 189 bp, Arabidopsis thaliana
  source 1..189: mol_type = genomic DNA
taaagaatccaatgtatgtgtgtgtgtgtgtgtgttttctctctcattcagatcctgagactgttatgtgctgattgtgatcttggaaactataaatggagaaaaggaagagagaatcatctgagagaagctttggtgaatcagagtctgtgtcttcactatctgagaaggattctgaaattcaagtaa

SEQ ID NO: 998 - protein, 61 aa, Arabidopsis thaliana
RIQCMCVCVCVFSLIQILRLLCADCDLGNYKWRKGRENHLREALVNQSLCLHYLRRILKFK

SEQ ID NO: 999 - DNA, 114 bp, Arabidopsis thaliana
  source 1..114: mol_type = genomic DNA
tgagagatcgctcgtcttcttctccgttttgcgatgcttggcacggtggtgcagtggtggttaacatattaccgtttaagatttggccggaaaaatcgagaacgaaagtggtga

SEQ ID NO: 1000 - protein, 36 aa, Arabidopsis thaliana
EIARLLLRFAMLGTVVQWWLTYYRLRFGRKNRERKW

SEQ ID NO: 1001 - DNA, 108 bp, Arabidopsis thaliana
  source 1..108: mol_type = genomic DNA
taagatccaagatcttgttttcttcttcgtatcgtcgcgaaactcgcgatttcttttttgtttttcttcttcgattttgagtttcttccgtttctgttttttatctga

SEQ ID NO: 1002 - protein, 34 aa, Arabidopsis thaliana
DPRSCFLLRIVAKLAISFLFFFFDFEFLPFLFFI

SEQ ID NO: 1003 - DNA, 165 bp, Arabidopsis thaliana
  source 1..165: mol_type = genomic DNA
taatcatctgtctttcaaaaagaaagaaaaaagaaaaattcgatttctgggtttgtttttgtcatacagaaaaaaatcaagcttatgaatttgtgtttaattttttgttttaatttgaaaggcaggttttttcagaacgagatcgttttttcaaatttcttctga

SEQ ID NO: 1004 - protein, 53 aa, Arabidopsis thaliana
SSVFQKERKKKNSISGFVFVIQKKIKLMNLCLIFCFNLKGRFFQNEIVFSNFF

SEQ ID NO: 1005 - DNA, 105 bp, Arabidopsis thaliana
  source 1..105: mol_type = genomic DNA
tagggtcgaagacaagaacgacaccgtttcaagggttgcaatttgcaaccttttgattggtctctcttctctttgcccaaccaaaaacaacctttgatgatataa

SEQ ID NO: 1006 - protein, 33 aa, Arabidopsis thaliana
GRRQERHRFKGCNLQPFDWSLFSLPNQKQPLMI

SEQ ID NO: 1007 - DNA, 105 bp, Arabidopsis thaliana; identical to SEQ ID NO: 1005
  source 1..105: mol_type = genomic DNA

SEQ ID NO: 1008 - protein, 33 aa, Arabidopsis thaliana; identical to SEQ ID NO: 1006

SEQ ID NO: 1009 - DNA, 51 bp, Arabidopsis thaliana
  source 1..51: mol_type = genomic DNA
tgatatattacttcaccgaagattcaggaactctttcttaggttgaattag

SEQ ID NO: 1010 - protein, 15 aa, Arabidopsis thaliana
YITSPKIQELFLRLN

SEQ ID NO: 1011 - DNA, 150 bp, Arabidopsis thaliana
  source 1..150: mol_type = genomic DNA
tgagatcatttcgctccgacggaaaattcaagttgcatatctgatcggagattgaaaagtgttggttcacgcagtatcgattcgtttgtttttgatgccagatctgatatattacttcaccgaagattcaggaactctttcttaggttga

SEQ ID NO: 1012 - protein, 48 aa, Arabidopsis thaliana
DHFAPTENSSCISDRRLKSVGSRSIDSFVFDARSDILLHRRFRNSFLG

SEQ ID NO: 1013 - DNA, 93 bp, Arabidopsis thaliana
  source 1..93: mol_type = genomic DNA
tgaaaagtgttggttcacgcagtatcgattcgtttgtttttgatgccagatctgatatattacttcaccgaagattcaggaactctttcttag

SEQ ID NO: 1014 - protein, 29 aa, Arabidopsis thaliana
KVLVHAVSIRLFLMPDLIYYFTEDSGTLS

SEQ ID NO: 1015 - DNA, 66 bp, Arabidopsis thaliana
  source 1..66: mol_type = genomic DNA
taatacaaacgggctagtgaaagcatgggaaggagagaggatacacgaggagagtggttcagatga

SEQ ID NO: 1016 - protein, 20 aa, Arabidopsis thaliana
YKRASESMGRREDTRGEWFR

SEQ ID NO: 1017 - DNA, 93 bp, Arabidopsis thaliana
  source 1..93: mol_type = genomic DNA
tgagagctaacggaaatgggatctcagctacttgagtgttgcttccgtttcgtcttctactgtcactcccacagctccaactgttttccttga

SEQ ID NO: 1018 - protein, 29 aa, Arabidopsis thaliana
ELTEMGSQLLECCFRFVFYCHSHSSNCFP

SEQ ID NO: 1019 - DNA, 135 bp, Arabidopsis thaliana
  source 1..135: mol_type = genomic DNA
tgacaaactctcctccgttggtcggagtttgtttcttcgctcgttcatcacaagcttcgtgtactggtaattgttccattttttctagctatttcggaaaattggatggaagaagcatctgaaatacgcgtgtaa

SEQ ID NO: 1020 - protein, 43 aa, Arabidopsis thaliana
QTLLRWSEFVSSLVHHKLRVLVIVPFFLAISENWMEEASEIRV

SEQ ID NO: 1021 - DNA, 60 bp, Arabidopsis thaliana
  source 1..60: mol_type = genomic DNA
tagctatttcggaaaattggatggaagaagcatctgaaatacgcgtgtaaatgtcgctga

SEQ ID NO: 1022 - protein, 18 aa, Arabidopsis thaliana
LFRKIGWKKHLKYACKCR

SEQ ID NO: 1023 - DNA, 78 bp, Arabidopsis thaliana
  source 1..78: mol_type = genomic DNA
tgattactccttctcttccgcaaaagatctttaatccagccacctttctcagtcgtttggattgtttctatgatttga

SEQ ID NO: 1024 - protein, 24 aa, Arabidopsis thaliana
LLLLFRKRSLIQPPFSVVWIVSMI

SEQ ID NO: 1025 - DNA, 84 bp, Arabidopsis thaliana
  source 1..84: mol_type = genomic DNA
tgacccaataattccgtctacatcttcgatgatccgtggaagaaccgcgaaagtaattcccagaaatgtcatttttacgcttag

SEQ ID NO: 1026 - protein, 26 aa, Arabidopsis thaliana
PNNSVYIFDDPWKNRESNSQKCHFYA

SEQ ID NO: 1027 - DNA, 54 bp, Arabidopsis thaliana
  source 1..54: mol_type = genomic DNA
tagagctgtgaaatgtgtcaagctgagtctcggagtgaaaagggtccggtttag

SEQ ID NO: 1028 - protein, 16 aa, Arabidopsis thaliana
SCEMCQAESRSEKGPV

SEQ ID NO: 1029 - DNA, 66 bp, Arabidopsis thaliana
  source 1..66: mol_type = genomic DNA
tgaaatctctcggaaaaggaagcttccgattctcctcttcgacgtcatggacaccatcgtccgtga

SEQ ID NO: 1030 - protein, 20 aa, Arabidopsis thaliana
NLSEKEASDSPLRRHGHHRP

SEQ ID NO: 1031 - DNA, 51 bp, Arabidopsis thaliana
  source 1..51: mol_type = genomic DNA
tgaaagaagaagaagaaaggaggagacatggatgaatctctgtgggtgtga

SEQ ID NO: 1032 - protein, 15 aa, Arabidopsis thaliana
KKKKKGGDMDESLWV

SEQ ID NO: 1033 - DNA, 51 bp, Arabidopsis thaliana; identical to SEQ ID NO: 1031
  source 1..51: mol_type = genomic DNA

SEQ ID NO: 1034 - protein, 15 aa, Arabidopsis thaliana
KKKKKGGDMDESLWV

SEQ ID NO: 1035 - DNA, 144 bp, Arabidopsis thaliana
  source 1..144: mol_type = genomic DNA
taaggggtcgctttttttcctcttcatcctcgccgccggcttatggccaactcgccaccaccttcgtcgcgaaatcctccgaagttgttggtggattgttggtcgtttccgtttcttctctctatggttcctactccctcataa

SEQ ID NO: 1036 - protein, 46 aa, Arabidopsis thaliana
GVAFFPLHPRRRLMANSPPPSSRNPPKLLVDCWSFPFLLSMVPTPS

SEQ ID NO: 1037 - DNA, 54 bp, Arabidopsis thaliana
  source 1..54: mol_type = genomic DNA
tgaaactcctcaagctttccattcagaatcgtagcaatggcttttcctctttga

SEQ ID NO: 1038 - protein, 16 aa, Arabidopsis thaliana
NSSSFPFRIVAMAFPL

SEQ ID NO: 1039 - DNA, 315 bp, Arabidopsis thaliana
  source 1..315: mol_type = genomic DNA
taatttccggatcgtccaaaagtttctcttttttttctcttccttcattgtttcgctgttcctgcgattctgaaactcctcaagctttccattcagaatcgtagcaatggcttttcctctttgattttgtttttgatccgtctctctctctctctctcattgcgtttaaggggtcgctttttttcctcttcatcctcgccgccggcttatggccaactcgccaccaccttcgtcgcgaaatcctccgaagttgttggtggattgttggtcgtttccgtttcttctctctatggttcctactccctcataatttaa

SEQ ID NO: 1040 - protein, 103 aa, Arabidopsis thaliana
FPDRPKVSLFFLFLHCFAVPAILKLLKLSIQNRSNGFSSLILFLIRLSLSLSLRLRGRFFSSSSSPPAYGQLATTFVAKSSEVVGGLLVVSVSSLYGSYSLII

SEQ ID NO: 1041 - DNA, 171 bp, Arabidopsis thaliana
  source 1..171: mol_type = genomic DNA
tgaatagtctctgatgatttcgatcaaagagaagccacggggggagcgctagcacttaaaggttcctcgctttcttctcaagtttatagtcttctcctctgtgttggctcatttacatgggtagatttagttttcgagggttttatggcgaagttcgcgatgttctgttaa

SEQ ID NO: 1042 - protein, 55 aa, Arabidopsis thaliana
IVSDDFDQREATGGALALKGSSLSSQVYSLLLCVGSFTWVDLVFEGFMAKFAMFC

SEQ ID NO: 1043 - DNA, 51 bp, Arabidopsis thaliana
  source 1..51: mol_type = genomic DNA
tgatttctgtttcatggcaagcctacttttagagctgagtttaatcgatga

SEQ ID NO: 1044 - protein, 15 aa, Arabidopsis thaliana
FLFHGKPTFRAEFNR

SEQ ID NO: 1045 - DNA, 105 bp, Arabidopsis thaliana
  source 1..105: mol_type = genomic DNA
taactgccacatgaagaccaaacacctaaaacctttgtccttctctctctctgtttcccaactccaacagtgtctcttgtctacatctcctccagacaaagataa

SEQ ID NO: 1046 - protein, 33 aa, Arabidopsis thaliana
LPHEDQTPKTFVLLSLCFPTPTVSLVYISSRQR

SEQ ID NO: 1047 - DNA, 135 bp, Arabidopsis thaliana
  source 1..135: mol_type = genomic DNA
tagcctttttgtccaccttttcataactgccacatgaagaccaaacacctaaaacctttgtccttctctctctctgtttcccaactccaacagtgtctcttgtctacatctcctccagacaaagataatctctag

SEQ ID NO: 1048 - protein, 43 aa, Arabidopsis thaliana
PFCPPFHNCHMKTKHLKPLSFSLSVSQLQQCLLSTSPPDKDNL

SEQ ID NO: 1049 - DNA, 120 bp, Arabidopsis thaliana
  source 1..120: mol_type = genomic DNA
taaaacctttgtccttctctctctctgtttcccaactccaacagtgtctcttgtctacatctcctccagacaaagataatctctagcatttttcaccatctccataaaagaattagatag

SEQ ID NO: 1050 - protein, 38 aa, Arabidopsis thaliana
NLCPSLSLFPNSNSVSCLHLLQTKIISSIFHHLHKRIR

SEQ ID NO: 1051 - DNA, 120 bp, Arabidopsis thaliana; identical to SEQ ID NO: 1049
  source 1..120: mol_type = genomic DNA

SEQ ID NO: 1052 - protein, 38 aa, Arabidopsis thaliana; identical to SEQ ID NO: 1050

SEQ ID NO: 1053 - DNA, 99 bp, Arabidopsis thaliana
  source 1..99: mol_type = genomic DNA
taaaccaccacatccttccctgaaaccctaaccacaacaatcgccgccgtctctagaaatatccatccacctacttcggctttgtttatcagattttga

SEQ ID NO: 1054 - protein, 31 aa, Arabidopsis thaliana
TTTSFPETLTTTIAAVSRNIHPPTSALFIRF

SEQ ID NO: 1055 - DNA, 129 bp, Arabidopsis thaliana
  source 1..129: mol_type = genomic DNA
taattgtggatagttcaatgtgatagctcacttgtgcttctgatcttgcaggaggaagtctccagctccctcgcctccacaaatctgctagtagagtgcctttcggaatacctgtctcataacaaatag

SEQ ID NO: 1056 - protein, 41 aa, Arabidopsis thaliana
LWIVQCDSSLVLLILQEEVSSSLASTNLLVECLSEYLSHNK

SEQ ID NO: 1057 - DNA, 57 bp, Arabidopsis thaliana
  source 1..57: mol_type = genomic DNA
tgagtaatttctcctttaaagctaagcatattttccctgtcgtgtgcttgtccttga

SEQ ID NO: 1058 - protein, 17 aa, Arabidopsis thaliana
VISPLKLSIFSLSCACP

SEQ ID NO: 1059 - DNA, 63 bp, Arabidopsis thaliana
  source 1..63: mol_type = genomic DNA
tagttatcgctgtgccttgtttggatggaatgttttaccctaatagcaacaactgtgatttag

SEQ ID NO: 1060 - protein, 19 aa, Arabidopsis thaliana
LSLCLVWMECFTLIATTVI

SEQ ID NO: 1061 - DNA, 54 bp, Arabidopsis thaliana
  source 1..54: mol_type = genomic DNA
tagtggtttggggctatctctgtttctaattcgtatatatgttatggaggttaa

SEQ ID NO: 1062 - protein, 16 aa, Arabidopsis thaliana
WFGAISVSNSYICYGG

SEQ ID NO: 1063 - DNA, 222 bp, Arabidopsis thaliana
  source 1..222: mol_type = genomic DNA
tgaatcagttctacaatgatctctgtctctcgattcttgtcgcctcaattctacgcaattccaaggagcttcgtaaaaatgtctgcttcagcgactcaaacggccggagaagtttcaatggggatcaagcctccttcacaccctacttacgatttgaaagctgttatcaaactagccctagctgaagatgctggtcatacaggttctctcttcaccttctaa

SEQ ID NO: 1064 - protein, 72 aa, Arabidopsis thaliana
ISSTMISVSRFLSPQFYAIPRSFVKMSASATQTAGEVSMGIKPPSHPTYDLKAVIKLALAEDAGHTGSLFTF

SEQ ID NO: 1065 - DNA, 60 bp, Arabidopsis thaliana
  source 1..60: mol_type = genomic DNA
tagccacagatgagttcatcgtttttgaccagatctgattgttttcgtctttgccgttga

SEQ ID NO: 1066 - protein, 18 aa, Arabidopsis thaliana
PQMSSSFLTRSDCFRLCR

SEQ ID NO: 1067 - DNA, 81 bp, Arabidopsis thaliana
  source 1..81: mol_type = genomic DNA
tagtttgtgcagaaatcgaattggagaaaccgagtaactatggtagccacagatgagttcatcgtttttgaccagatctga

SEQ ID NO: 1068 - protein, 25 aa, Arabidopsis thaliana
FVQKSNWRNRVTMVATDEFIVFDQI

SEQ ID NO: 1069 - DNA, 81 bp, Arabidopsis thaliana; identical to SEQ ID NO: 1067
  source 1..81: mol_type = genomic DNA

SEQ ID NO: 1070 - protein, 25 aa, Arabidopsis thaliana
FVQKSNWRNRVTMVATDEFIVFDQI

SEQ ID NO: 1071 - DNA, 123 bp, Arabidopsis thaliana
  source 1..123: mol_type = genomic DNA
tgaccatcgacgagttttgaaactcaaattgttgtttatttcttcagtaactatggctatcgattgtctcgtacttggtgctggacaagagattggaaagagctgtgtggtagtgacgattaa

SEQ ID NO: 1072 - protein, 39 aa, Arabidopsis thaliana
PSTSFETQIVVYFFSNYGYRLSRTWCWTRDWKELCGSDD

SEQ ID NO: 1073 - DNA, 66 bp, Arabidopsis thaliana
  source 1..66: mol_type = genomic DNA
tgaattctgattacaaaaaccctaattttcgtttctgggtacctcaaagatctgtgctttcgttag

SEQ ID NO: 1074 - protein, 20 aa, Arabidopsis thaliana
ILITKTLIFVSGYLKDLCFR

SEQ ID NO: 1075 - DNA, 87 bp, Arabidopsis thaliana
  source 1..87: mol_type = genomic DNA
taattttcgtttctgggtacctcaaagatctgtgctttcgttagaaaatggatagattttatgttaatttcatggaaatttcgatga

SEQ ID NO: 1076 - protein, 27 aa, Arabidopsis thaliana
FSFLGTSKICAFVRKWIDFMLISWKFR

SEQ ID NO: 1077 - DNA, 249 bp, Arabidopsis thaliana
  source 1..249: mol_type = genomic DNA
taaggatctctggtttctctttctctcctctgtcttatcttctccaaagttacgctttttttcaatgaaaacattttcttgattcctgatttcaaatttcacaatctggatttcgtgtttcgaattcactttgaagaaaaagtttctcaatttcgcctgaaaacccacatgggattggaactaaacactagactgacaagaagaagaagagtaatcatcatcgagtgtttattacgattatgtccttaa

SEQ ID NO: 1078 - protein, 81 aa, Arabidopsis thaliana
GSLVSLSLLCLIFSKVTLFFNENIFLIPDFKFHNLDFVFRIHFEEKVSQFRLKTHMGLELNTRLTRRRRVIIIECLLRLCP

SEQ ID NO: 1079 - DNA, 135 bp, Arabidopsis thaliana
  source 1..135: mol_type = genomic DNA
taatttctcaattccgtatctctcatttcatcttcttcttcttctcctttacttaaggatctctggtttctctttctctcctctgtcttatcttctccaaagttacgctttttttcaatgaaaacattttcttga

SEQ ID NO: 1080 - protein, 43 aa, Arabidopsis thaliana
FLNSVSLISSSSSSPLLKDLWFLFLSSVLSSPKLRFFSMKTFS

SEQ ID NO: 1081 - DNA, 81 bp, Arabidopsis thaliana
  source 1..81: mol_type = genomic DNA
taagcttttcttaattattattataattttctcttcttaatccccaaatctcctgatggattcatgaaccagatcggctga

SEQ ID NO: 1082 - protein, 25 aa, Arabidopsis thaliana
AFLNYYYNFLFLIPKSPDGFMNQIG

SEQ ID NO: 1083 - DNA, 240 bp, Arabidopsis thaliana
  source 1..240: mol_type = genomic DNA
tagttaccaaatcaatggcaggtatcaaagttttcggacacccagcttccacttccaccaggagagtcctcatcgccctccatgagaaaaacctcgactttgagctcgttcatgttgaactcaaagacggtgagcacaagaaggagcctttcctctcccgcaacccttttggtcaagttccagcctttgaagatggagacctcaagctcttcgaatcaagagcgattactcagtacatag

SEQ ID NO: 1084 - protein, 78 aa, Arabidopsis thaliana
LPNQWQVSKFSDTQLPLPPGESSSPSMRKTSTLSSFMLNSKTVSTRRSLSSPATLLVKFQPLKMETSSSSNQERLLST

SEQ ID NO: 1085 - DNA, 72 bp, Arabidopsis thaliana
  source 1..72: mol_type = genomic DNA
taatgtttctacagattctctcctcctaattcagagacgacaaaacgctataaacaacatttttacaggtga

SEQ ID NO: 1086 - protein, 22 aa, Arabidopsis thaliana
CFYRFSPPNSETTKRYKQHFYR

SEQ ID NO: 1087 - DNA, 102 bp, Arabidopsis thaliana
  source 1..102: mol_type = genomic DNA
taattttgctttttaatctcttttatttttatttttatttctatcaccgagaacgacatcggagacttgagagcggcggcgagcttcaccggcgctggttaa

SEQ ID NO: 1088 - protein, 32 aa, Arabidopsis thaliana
FCFLISFIFIFISITENDIGDLRAAASFTGAG

SEQ ID NO: 1089 - DNA, 102 bp, Arabidopsis thaliana
  source 1..102: mol_type = genomic DNA
taagttttcaaagaggaaacacatatatatgttatggattcggtatgttattatatttcccggttctatttctcaaacacactctctcgtcttctccaataa

SEQ ID NO: 1090 - protein, 32 aa, Arabidopsis thaliana
VFKEETHIYVMDSVCYYISRFYFSNTLSRLLQ

SEQ ID NO: 1091 - DNA, 72 bp, Arabidopsis thaliana
  source 1..72: mol_type = genomic DNA
taaaagactgcacaaagaaatattttatacaaaatgaaagagagaaacacgacacgaattttgtataattaa

SEQ ID NO: 1092 - protein, 22 aa, Arabidopsis thaliana
KTAQRNILYKMKERNTTRILYN

SEQ ID NO: 1093 - DNA, 165 bp, Arabidopsis thaliana
  source 1..165: mol_type = genomic DNA
tagcaaagggctgatccatttagagcccgagaatatgtatctagtggagagcaaaggaggtgccatagcttgtatgcttttagccttactatctctagggacttggccagcagttttaacacttttagagagacgtggccgtcttcctcaacacacctatcttga

SEQ ID NO: 1094 - protein, 53 aa, Arabidopsis thaliana
QRADPFRAREYVSSGEQRRCHSLYAFSLTISRDLASSFNTFRETWPSSSTHLS

SEQ ID NO: 1095 - DNA, 63 bp, Arabidopsis thaliana
  source 1..63: mol_type = genomic DNA
taaaaagtcaaatccatgagagaaaaatactctctctggagaagaagaagcaccgtttcatag

SEQ ID NO: 1096 - protein, 19 aa, Arabidopsis thaliana
KVKSMREKYSLWRRRSTVS

SEQ ID NO: 1097 - DNA, 132 bp, Arabidopsis thaliana
  source 1..132: mol_type = genomic DNA
tgaaagtttcttctttttcattctcttcttctccttcagattccttgcctcttcttcaagattctcctctcttccatgtgcgtttctgtgcttttgaagacgacgatgatgatgatgatgtctttatattga

SEQ ID NO: 1098 - protein, 42 aa, Arabidopsis thaliana
KFLLFHSLLLLQIPCLFFKILLSSMCVSVLLKTTMMMMMSLY

SEQ ID NO: 1099 - DNA, 63 bp, Arabidopsis thaliana
  source 1..63: mol_type = genomic DNA
tgagttttgatttttcagatctcgcttcttttccgatttgttcaatcatcatggcttacctga

SEQ ID NO: 1100 - protein, 19 aa, Arabidopsis thaliana
VLIFQISLLFRFVQSSWLT

SEQ ID NO: 1101 - DNA, 132 bp, Arabidopsis thaliana; identical to SEQ ID NO: 1097
  source 1..132: mol_type = genomic DNA

SEQ ID NO: 1102 - protein, 42 aa, Arabidopsis thaliana; identical to SEQ ID NO: 1098

SEQ ID NO: 1103 - DNA, 90 bp, Arabidopsis thaliana
  source 1..90: mol_type = genomic DNA
taacattgcaatcaggtactagaaaggacaaccttttgcggtgtgccttgcaagagtcttcaacttctgctggtaaagattgatgcataa

SEQ ID NO: 1104 - protein, 28 aa, Arabidopsis thaliana
HCNQVLERTTFCGVPCKSLQLLLVKIDA

SEQ ID NO: 1105 - DNA, 222 bp, Arabidopsis thaliana
  source 1..222: mol_type = genomic DNA
taatcgttgaagaagctcaattacagtttctgtttcttcctaattatggcaacaatagcaggaggatcatttggagtcccaagctctcgtatctctataacaacaccaactctctcttcctcttctttgcttccaccactaacattgcaatcaggtactagaaaggacaaccttttgcggtgtgccttgcaagagtcttcaacttctgctggtaaagattga

SEQ ID NO: 1106 - protein, 72 aa, Arabidopsis thaliana
SLKKLNYSFCFFLIMATIAGGSFGVPSSRISITTPTLSSSSLLPPLTLQSGTRKDNLLRCALQESSTSAGKD

SEQ ID NO: 1107 - DNA, 57 bp, Arabidopsis thaliana
  source 1..57: mol_type = genomic DNA
tagaaaggacaaccttttgcggtgtgccttgcaagagtcttcaacttctgctggtaa

SEQ ID NO: 1108 - protein, 17 aa, Arabidopsis thaliana
KGQPFAVCLARVFNFCW

SEQ ID NO: 1109 - DNA, 66 bp, Arabidopsis thaliana
  source 1..66: mol_type = genomic DNA
taaattgttgatgatcgcttctcatatttgaccctagaggttcgtacttttctctcttttcactaa

SEQ ID NO: 1110 - protein, 20 aa, Arabidopsis thaliana
IVDDRFSYLTLEVRTFLSFH

SEQ ID NO: 1111 - DNA, 252 bp, Arabidopsis thaliana
  source 1..252: mol_type = genomic DNA
tagctctctggtccaataatcgagaaacctatcttgaccaccttctccgacgccggtgtagcccacgcttgccagcgtcgggatttttccttccctgcttctctctatttcacattgctatctgtttcccctcttgtgcggccgtttcctcaatcatctagtgtaatcaagcgtcttaaagtggagaacggcatttcatcctccatcatactcagatctatcgacgctggttcttcctcgatctccctttaa

SEQ ID NO: 1112 - protein, 82 aa, Arabidopsis thaliana
LSGPIIEKPILTTFSDAGVAHACQRRDFSFPASLYFTLLSVSPLVRPFPQSSSVIKRLKVENGISSSIILRSIDAGSSSISL

SEQ ID NO: 1113 - DNA, 54 bp, Arabidopsis thaliana
  source 1..54: mol_type = genomic DNA
tgatgtctcttagattgcttcttacactatttcccatttgaccagagactttaa

SEQ ID NO: 1114 - protein, 16 aa, Arabidopsis thaliana
CLLDCFLHYFPFDQRL

SEQ ID NO: 1115 - DNA, 105 bp, Arabidopsis thaliana
  source 1..105: mol_type = genomic DNA
taaatctcaccggaaatagcggcgactttgtgccacatccgaggatccatcgatcgtcgtcctctgatgtctcttagattgcttcttacactatttcccatttga

SEQ ID NO: 1116 - protein, 33 aa, Arabidopsis thaliana
ISPEIAATLCHIRGSIDRRPLMSLRLLLTLFPI

SEQ ID NO: 1117 - DNA, 51 bp, Arabidopsis thaliana
  source 1..51: mol_type = genomic DNA
tagcggcgactttgtgccacatccgaggatccatcgatcgtcgtcctctga

SEQ ID NO: 1118 - protein, 15 aa, Arabidopsis thaliana
RRLCATSEDPSIVVL

SEQ ID NO: 1119 - DNA, 66 bp, Arabidopsis thaliana
  source 1..66: mol_type = genomic DNA
tagattgcttcttacactatttcccatttgaccagagactttaagcgagatgtgtcaagtcggtga

SEQ ID NO: 1120 - protein, 20 aa, Arabidopsis thaliana
IASYTISHLTRDFKRDVSSR

SEQ ID NO: 1121 - DNA, 75 bp, Arabidopsis thaliana
  source 1..75: mol_type = genomic DNA
taagataagaagttttttagagatgaatttcacagaatcaatgaacgttgtgcacgccagaatccaacaacttga

SEQ ID NO: 1122 - protein, 23 aa, Arabidopsis thaliana
DKKFFRDEFHRINERCARQNPTT

SEQ ID NO: 1123 - DNA, 54 bp, Arabidopsis thaliana
  source 1..54: mol_type = genomic DNA
tgaatcttcacagaagcaacttcacggagaacggcgagaagaatgtggaattga

SEQ ID NO: 1124 - protein, 16 aa, Arabidopsis thaliana
IFTEATSRRTARRMWN

SEQ ID NO: 1125 - DNA, 72 bp, Arabidopsis thaliana
  source 1..72: mol_type = genomic DNA
tgatcattgataaggtctcattccggtggcaatcgtcgtcgccggaaacaatgtgcacagatacgaccttga

SEQ ID NO: 1126 - protein, 22 aa, Arabidopsis thaliana
SLIRSHSGGNRRRRKQCAQIRP

SEQ ID NO: 1127 - DNA, 90 bp, Arabidopsis thaliana
  source 1..90: mol_type = genomic DNA
taaggtctcattccggtggcaatcgtcgtcgccggaaacaatgtgcacagatacgaccttgaggggatgattcaagtgagagaaagataa

SEQ ID NO: 1128 - protein, 28 aa, Arabidopsis thaliana
GLIPVAIVVAGNNVHRYDLEGMIQVRER

SEQ ID NO: 1129 - DNA, 54 bp, Arabidopsis thaliana; identical to SEQ ID NO: 1123
  source 1..54: mol_type = genomic DNA

SEQ ID NO: 1130 - protein, 16 aa, Arabidopsis thaliana
IFTEATSRRTARRMWN

SEQ ID NO: 1131 - DNA, 99 bp, Arabidopsis thaliana
  source 1..99: mol_type = genomic DNA
tagaggatcgagaagcgtcggccgtttcactggagagatctagtgttgttcgttgatgaaggggttctaatttcgatacctaacggaattgatcattga

SEQ ID NO: 1132 - protein, 31 aa, Arabidopsis thaliana
RIEKRRPFHWRDLVLFVDEGVLISIPNGIDH

SEQ ID NO: 1133 - DNA, 102 bp, Arabidopsis thaliana
  source 1..102: mol_type = genomic DNA
taatttcgatacctaacggaattgatcattgataaggtctcattccggtggcaatcgtcgtcgccggaaacaatgtgcacagatacgaccttgaggggatga

SEQ ID NO: 1134 - protein, 32 aa, Arabidopsis thaliana
FRYLTELIIDKVSFRWQSSSPETMCTDTTLRG

SEQ ID NO: 1135 - DNA, 72 bp, Arabidopsis thaliana; identical to SEQ ID NO: 1125
  source 1..72: mol_type = genomic DNA

SEQ ID NO: 1136 - protein, 22 aa, Arabidopsis thaliana
SLIRSHSGGNRRRRKQCAQIRP

SEQ ID NO: 1137 - DNA, 117 bp, Arabidopsis thaliana
  source 1..117: mol_type = genomic DNA
taaacattccaaataactatctccattctttggagttacccaatttcgacgttgaacacaaacccttgcttctctcttctctgtttctctctcgcagcgaaaaatcatggcgattag

SEQ ID NO: 1138 - protein, 37 aa, Arabidopsis thaliana
TFQITISILWSYPISTLNTNPCFSLLCFSLAAKNHGD

SEQ ID NO: 1139 - DNA, 111 bp, Arabidopsis thaliana
  source 1..111: mol_type = genomic DNA
tgaattggtttttttttgtccagtatctccgccttctacagttgtgatgcgggccctctttctggcatcaccgcctcctataggcggcgttggctagctttgcttttttaa

SEQ ID NO: 1140 - protein, 35 aa, Arabidopsis thaliana
IGFFLSSISAFYSCDAGPLSGITASYRRRWLALLF

SEQ ID NO: 1141 - DNA, 150 bp, Arabidopsis thaliana
  source 1..150: mol_type = genomic DNA
tgaaagaagtgtttcttttgcggacaagttttcctggcttttgctatcccaattgaattggtttttttttgtccagtatctccgccttctacagttgtgatgcgggccctctttctggcatcaccgcctcctataggcggcgttggctag

SEQ ID NO: 1142 - protein, 48 aa, Arabidopsis thaliana
KKCFFCGQVFLAFAIPIELVFFCPVSPPSTVVMRALFLASPPPIGGVG

SEQ ID NO: 1143 - DNA, 54 bp, Arabidopsis thaliana
  source 1..54: mol_type = genomic DNA
tgaaagagggcaaaagtgtgtaggagaaagaattctaaaaacgtcgacgcttaa

SEQ ID NO: 1144 - protein, 16 aa, Arabidopsis thaliana
KRAKVCRRKNSKNVDA

SEQ ID NO: 1145 - DNA, 75 bp, Arabidopsis thaliana
  source 1..75: mol_type = genomic DNA
tgagatgtacacacaacaaggcttctcgaatcttcccatatgcatgtcgaaaacgcagtactcattctcacatga

SEQ ID NO: 1146 - protein, 23 aa, Arabidopsis thaliana
DVHTTRLLESSHMHVENAVLILT

SEQ ID NO: 1147 - DNA, 213 bp, Arabidopsis thaliana
  source 1..213: mol_type = genomic DNA
tagattgaaaattgctcatacaggcacataaacagattgagatgtacacacaacaaggcttctcgaatcttcccatatgcatgtcgaaaacgcagtactcattctcacatgatgcatcaaagaaaggagcaccttcagggtttgtattgccaattcgggatgttagaggaagcattggagctggtttcatatatccactggttggtacaatga

SEQ ID NO: 1148 - protein, 69 aa, Arabidopsis thaliana
IENCSYRHINRLRCTHNKASRIFPYACRKRSTHSHMMHQRKEHLQGLYCQFGMLEEALELVSYIHWLVQ

SEQ ID NO: 1149 - DNA, 210 bp, Arabidopsis thaliana
  source 1..210: mol_type = genomic DNA
taaaaaagagatacgtgttatgcaatgtgggatgttgagagaagaaaaaggtttcgccgtcaccgactcatcatcaccggaaacttccttcatcagctgtcaccgactcatcatcaccggaaacttccttcaccagccggcagatcaactcagtcctccaagaaacctctatctctgccttcgattgtacctactcgccttttgccatag

SEQ ID NO: 1150 - protein, 68 aa, Arabidopsis thaliana
KRDTCYAMWDVERRKRFRRHRLIITGNFLHQLSPTHHHRKLPSPAGRSTQSSKKPLSLPSIVPTRLLP

SEQ ID NO: 1151 - DNA, 114 bp, Arabidopsis thaliana
  source 1..114: mol_type = genomic DNA
taagaatcgtgcagaggagaggataccacaccacacccagaaattgaaactaccaaaaagtttatgaatttgatttcaatttcaactttttatgagacccatttgattctttag

SEQ ID NO: 1152 - protein, 36 aa, Arabidopsis thaliana
ESCRGEDTTPHPEIETTKKFMNLISISTFYETHLIL

SEQ ID NO: 1153 - DNA, 57 bp, Arabidopsis thaliana
  source 1..57: mol_type = genomic DNA
tgagacccatttgattctttagggattttgaagatcgttgtgaaatttggttcgtga

SEQ ID NO: 1154 - protein, 17 aa, Arabidopsis thaliana
DPFDSLGILKIVVKFGS

SEQ ID NO: 1155 - DNA, 51 bp, Arabidopsis thaliana
  source 1..51: mol_type = genomic DNA
tgaatcttttgtgtgggtaaaacattttgtattatcaagattttgatttga

SEQ ID NO: 1156 - protein, 15 aa, Arabidopsis thaliana
IFCVGKTFCIIKILI

SEQ ID NO: 1157 - DNA, 72 bp, Arabidopsis thaliana
  source 1..72: mol_type = genomic DNA
taaggaggatggatcttttgttttcttgaatcttttgtgtgggtaaaacattttgtattatcaagattttga

SEQ ID NO: 1158 - protein, 22 aa, Arabidopsis thaliana
GGWIFCFLESFVWVKHFVLSRF

SEQ ID NO: 1159 - DNA, 147 bp, Arabidopsis thaliana
  source 1..147: mol_type = genomic DNA
tgacacaagaagcaaaaggatctaacaaagtcatttactggaaagagaatagcaccaaaaagcacaaagctcatggcaaaaccaatacttacaagttctacaattatacttctggttttatccatcattgccctatcagaaacttag

SEQ ID NO: 1160 - protein, 47 aa, Arabidopsis thaliana
HKKQKDLTKSFTGKRIAPKSTKLMAKPILTSSTIILLVLSIIALSET

SEQ ID NO: 1161 - DNA, 114 bp, Arabidopsis thaliana
  source 1..114: mol_type = genomic DNA
tagcaccaaaaagcacaaagctcatggcaaaaccaatacttacaagttctacaattatacttctggttttatccatcattgccctatcagaaacttagaggtccatcatcataa

SEQ ID NO: 1162 - protein, 36 aa, Arabidopsis thaliana
HQKAQSSWQNQYLQVLQLYFWFYPSLPYQKLRGPSS

SEQ ID NO: 1163 - DNA, 138 bp, Arabidopsis thaliana
  source 1..138: mol_type = genomic DNA
taatttgaaggaattgttgagtttggtttacacttttgcccgcggcttctccttcgtggggaagtcgtgggcacaaacatcggcgcttgttcacctctcgtcatcgcatttgttgccttgctcgcattggtgctttag

SEQ ID NO: 1164 - protein, 44 aa, Arabidopsis thaliana
FEGIVEFGLHFCPRLLLRGEVVGTNIGACSPLVIAFVALLALVL

SEQ ID NO: 1165 - DNA, 213 bp, Arabidopsis thaliana
  source 1..213: mol_type = genomic DNA
taattcacgggcgatgttacgctcgatgatgagttccggggcctgtgtttcgtacctaatttgaaggaattgttgagtttggtttacacttttgcccgcggcttctccttcgtggggaagtcgtgggcacaaacatcggcgcttgttcacctctcgtcatcgcatttgttgccttgctcgcattggtgctttaggcggaaagtgcttggctaa

SEQ ID NO: 1166 - protein, 69 aa, Arabidopsis thaliana
FTGDVTLDDEFRGLCFVPNLKELLSLVYTFARGFSFVGKSWAQTSALVHLSSSHLLPCSHWCFRRKVLG

SEQ ID NO: 1167 - DNA, 51 bp, Arabidopsis thaliana
  source 1..51: mol_type = genomic DNA
tgaatgtgcttcagattgtttagagaagatctctcaaggccgtggaaataa

SEQ ID NO: 1168 - protein, 15 aa, Arabidopsis thaliana
MCFRLFREDLSRPWK

SEQ ID NO: 1169 - DNA, 66 bp, Arabidopsis thaliana
  source 1..66: mol_type = genomic DNA
tagagaagatctctcaaggccgtggaaataagaattcaaagaagcaaggtattgcttcaaggataa

SEQ ID NO: 1170 - protein, 20 aa, Arabidopsis thaliana
RRSLKAVEIRIQRSKVLLQG

SEQ ID NO: 1171 - DNA, 117 bp, Arabidopsis thaliana
  source 1..117: mol_type = genomic DNA
tagattgtgacggaggagacaaaatcatcatctctgttcttcttcttctcctctctcacatacgatgatgacccaacaaccttgacgttgatttcgatgtcacacacaacactataa

SEQ ID NO: 1172 - protein, 37 aa, Arabidopsis thaliana
IVTEETKSSSLFFFFSSLTYDDDPTTLTLISMSHTTL

SEQ ID NO: 1173 - DNA, 111 bp, Arabidopsis thaliana
  source 1..111: mol_type = genomic DNA
tgagagaaagagacgaggaagaagaagaagaagaagaaaggaagtgacgaagaaagaatgagaagacgaagaaagagaaaacaagatccgattcaaaatatggaaacttga

SEQ ID NO: 1174 - protein, 35 aa, Arabidopsis thaliana
EKETRKKKKKKKGSDEERMRRRRKRKQDPIQNMET

SEQ ID NO: 1175 - DNA, 57 bp, Arabidopsis thaliana
  source 1..57: mol_type = genomic DNA
taaccgcgtgaaaccaccaagaaacctatagtaagagtttccgcaaatgtgaattaa

SEQ ID NO: 1176 - protein, 17 aa, Arabidopsis thaliana
PRETTKKPIVRVSANVN

SEQ ID NO: 1177 - DNA, 60 bp, Arabidopsis thaliana
  source 1..60: mol_type = genomic DNA
taatttctccatctctcaatctctctgtgtttgtatctctcatctctgtttgagagatga

SEQ ID NO: 1178 - protein, 18 aa, Arabidopsis thaliana
FLHLSISLCLYLSSLFER

SEQ ID NO: 1179 - DNA, 51 bp, Arabidopsis thaliana
  source 1..51: mol_type = genomic DNA
taatcaccattagtcttcttcttcttcttctctctctctctctctgtctga

SEQ ID NO: 1180 - protein, 15 aa, Arabidopsis thaliana
SPLVFFFFFSLSLSV

SEQ ID NO: 1181 - DNA, 204 bp, Arabidopsis thaliana
  source 1..204: mol_type = genomic DNA
taatttcacttcaccggagatctccaatcgccggagaaatgggaggattattgcatctcttcgatttccacaacaacagtttctcccgtaaagttttctctcatcacaaaaaccgcgacgaagatctggaagctccaagaaatagtttcgagcttcaagtcgacaactttcatacataccataacgggaaagataaaccggtaa

SEQ ID NO: 1182 - protein, 66 aa, Arabidopsis thaliana
FHFTGDLQSPEKWEDYCISSISTTTVSPVKFSLITKTATKIWKLQEIVSSFKSTTFIHTITGKINR

SEQ ID NO: 1183 - DNA, 330 bp, Arabidopsis thaliana
  source 1..330: mol_type = genomic DNA
taaagacaaattcatagttccagtttccgaacttcactctctcttgtcggattctctgatgagtcatcagatctctgtttgaactatccaatttctcatcctctcttattttcttttttaatttcacttcaccggagatctccaatcgccggagaaatgggaggattattgcatctcttcgatttccacaacaacagtttctcccgtaaagttttctctcatcacaaaaaccgcgacgaagatctggaagctccaagaaatagtttcgagcttcaagtcgacaactttcatacataccataacgggaaagataaaccggtaaataaataa

SEQ ID NO: 1184 - protein, 108 aa, Arabidopsis thaliana
RQIHSSSFRTSLSLVGFSDESSDLCLNYPISHPLLFSFLISLHRRSPIAGEMGGLLHLFDFHNNSFSRKVFSHHKNRDEDLEAPRNSFELQVDNFHTYHNGKDKPVNK

SEQ ID NO: 1185 - DNA, 162 bp, Arabidopsis thaliana
  source 1..162: mol_type = genomic DNA
tgacaatggcaagaatcggaagctttctcattattctttacctcatttacgctcttactctctgcatctgcgacgacgacgagagtaactatggcggcgacaaagggaacctcttcccaggtttctacagaagctcgtgccctagagccgaggagatcgtga

SEQ ID NO: 1186 - protein, 52 aa, Arabidopsis thaliana
QWQESEAFSLFFTSFTLLLSASATTTRVTMAATKGTSSQVSTEARALEPRRS

SEQ ID NO: 1187 - DNA, 81 bp, Arabidopsis thaliana
  source 1..81: mol_type = genomic DNA
tagaacccatctcgttcaatctttctccgtcgtcttcctctactggttttacaacgtttcatgaattgctacaaactctaa

SEQ ID NO: 1188 - protein, 25 aa, Arabidopsis thaliana
NPSRSIFLRRLPLLVLQRFMNCYKL

SEQ ID NO: 1189 - DNA, 159 bp, Arabidopsis thaliana
  source 1..159: mol_type = genomic DNA
taaaaatttgagtcttttgatgatcggaaactgatgactcccgttctctgcgaaatcctgctctctgggctcacggtcaaatctgctctctgccgtagaacccatctcgttcaatctttctccgtcgtcttcctctactggttttacaacgtttcatga

SEQ ID NO: 1190 - protein, 51 aa, Arabidopsis thaliana
KFESFDDRKLMTPVLCEILLSGLTVKSALCRRTHLVQSFSVVFLYWFYNVS

SEQ ID NO: 1191 - DNA, 84 bp, Arabidopsis thaliana
  source 1..84: mol_type = genomic DNA
tgaaaaagtttaatttgtctctttctctatttatctccggcgtcaatttcacggcggctacacgacggttatcgatgtcattga

SEQ ID NO: 1192 - protein, 26 aa, Arabidopsis thaliana
KSLICLFLYLSPASISRRLHDGYRCH

SEQ ID NO: 1193 - DNA, 144 bp, Arabidopsis thaliana
  source 1..144: mol_type = genomic DNA
tagcttctgttgcaagaaacggctccacgcgaattcttgagcagacaatgcgaaagccatgtctacttcatgtttcacgggttcttgtttggttggagagaaaagactcgctttctcttgtttataatttgcctctccatgtga

SEQ ID NO: 1194 - protein, 46 aa, Arabidopsis thaliana
LLLQETAPREFLSRQCESHVYFMFHGFLFGWREKTRFLLFIICLSM

SEQ ID NO: 1195 - DNA, 63 bp, Arabidopsis thaliana
  source 1..63: mol_type = genomic DNA
tagagagatctgaataaacttgttctcttgtttttcttcttcttcttcttcaaatgtgactaa

SEQ ID NO: 1196 - protein, 19 aa, Arabidopsis thaliana
RDLNKLVLLFFFFFFFKCD

SEQ ID NO: 1197 - DNA, 75 bp, Arabidopsis thaliana
  source 1..75: mol_type = genomic DNA
tgaataaacttgttctcttgtttttcttcttcttcttcttcaaatgtgactaaatttataatctttcggttttga

SEQ ID NO: 1198 - protein, 23 aa, Arabidopsis thaliana
INLFSCFSSSSSSNVTKFIIFRF

SEQ ID NO: 1199 - DNA, 126 bp, Arabidopsis thaliana
  source 1..126: mol_type = genomic DNA
tagtttcatcgccgatcaaaaactagcaacgaaccaatgcaccttcgatcccgtcctctcatggccacgttgcttgatttcgatttcgagcttcttattttttattttcttcacgaaactcgttga

SEQ ID NO: 1200 - protein, 40 aa, Arabidopsis thaliana
FHRRSKTSNEPMHLRSRPLMATLLDFDFELLIFYFLHETR

SEQ ID NO: 1201 - DNA, 78 bp, Arabidopsis thaliana
  source 1..78: mol_type = genomic DNA
tgatttcgatttcgagcttcttattttttattttcttcacgaaactcgttgaaacgatctaatcttcaacatctttga

SEQ ID NO: 1202 - protein, 24 aa, Arabidopsis thaliana
FRFRASYFLFSSRNSLKRSNLQHL

SEQ ID NO: 1203 - DNA, 84 bp, Arabidopsis thaliana
  source 1..84: mol_type = genomic DNA
taagcgagacacacacacacgcgcagtcttcttcatcttgcttgcttctggttgcttaaccaaaacaccatggaatctccctaa

SEQ ID NO: 1204 - protein, 26 aa, Arabidopsis thaliana
ARHTHTRSLLHLACFWLLNQNTMESP

SEQ ID NO: 1205 - DNA, 66 bp, Arabidopsis thaliana
  source 1..66: mol_type = genomic DNA
taaaaaactcttccttttttttttccagtgaaatttctcttcttctccgttttcatacaagtctga

SEQ ID NO: 1206 - protein, 20 aa, Arabidopsis thaliana
KTLPFFFPVKFLFFSVFIQV

SEQ ID NO: 1207 - DNA, 54 bp, Arabidopsis thaliana
  source 1..54: mol_type = genomic DNA
taattggtttcgatgtgtgacagagagagacaacgagacgaatttcaaatctag

SEQ ID NO: 1208 - protein, 16 aa, Arabidopsis thaliana
LVSMCDRERQRDEFQI

SEQ ID NO: 1209 - DNA, 114 bp, Arabidopsis thaliana
  source 1..114: mol_type = genomic DNA
taatatatatttttgccaagaacaagtcttttactttatctctgcagtttttgtttgctcctttgtgcatttggtgatgattcaatcaatgattgtctcttacctttgatctaa

SEQ ID NO: 1210 - protein, 36 aa, Arabidopsis thaliana
YIFLPRTSLLLYLCSFCLLLCAFGDDSINDCLLPLI

SEQ ID NO: 1211 - DNA, 114 bp, Arabidopsis thaliana; identical to SEQ ID NO: 1209
  source 1..114: mol_type = genomic DNA

SEQ ID NO: 1212 - protein, 36 aa, Arabidopsis thaliana; identical to SEQ ID NO: 1210

SEQ ID NO: 1213 - DNA, 51 bp, Arabidopsis thaliana
  source 1..51: mol_type = genomic DNA
taaaaaagagatcaccaattcaccatgaaagagatctctccaatttcttag

SEQ ID NO: 1214 - protein, 15 aa, Arabidopsis thaliana
KRDHQFTMKEISPIS

SEQ ID NO: 1215 - DNA, 51 bp, Arabidopsis thaliana; identical to SEQ ID NO: 1213
  source 1..51: mol_type = genomic DNA

SEQ ID NO: 1216 - protein, 15 aa, Arabidopsis thaliana
KRDHQFTMKEISPIS

SEQ ID NO: 1217 - DNA, 78 bp, Arabidopsis thaliana
  source 1..78: mol_type = genomic DNA
tgatggtgttctgatactgattttaagtggtctgatgaatccatgaatgatttatgtgggagatggatgaaactataa

SEQ ID NO: 1218 - protein, 24 aa, Arabidopsis thaliana
WCSDTDFKWSDESMNDLCGRWMKL

SEQ ID NO: 1219 - DNA, 108 bp, Arabidopsis thaliana
  source 1..108: mol_type = genomic DNA
tgaaaccagtctccacatagcgatagagagagagatctgttatgtgtgtattcatcaagttctctttttttgggctcaaagtgtaaaaggagacattttcaattctga

SEQ ID NO: 1220 - protein, 34 aa, Arabidopsis thaliana
NQSPHSDRERDLLCVYSSSSLFLGSKCKRRHFQF

SEQ ID NO: 1221 - DNA, 99 bp, Arabidopsis thaliana
  source 1..99: mol_type = genomic DNA
tgaaaattggattacctcattagaaaattccaccaatttggtcaaatagagacgatgagatttctaagaagtctctccggttcagatctggtcatctaa

SEQ ID NO: 1222 - protein, 31 aa, Arabidopsis thaliana
KLDYLIRKFHQFGQIETMRFLRSLSGSDLVI

SEQ ID NO: 1223 - DNA, 51 bp, Arabidopsis thaliana
  source 1..51: mol_type = genomic DNA
tgattacacttctccttttatgcaacaatgcaattttcattgatatcttag

SEQ ID NO: 1224 - protein, 15 aa, Arabidopsis thaliana
LHFSFYATMQFSLIS

SEQ ID NO: 1225 - DNA, 183 bp, Arabidopsis thaliana
  source 1..183: mol_type = genomic DNA
taaaggatacccgaatccttcctccaatctcgacttttaagacctccctccatcaaaacactcttgtattgtatgtatggctttcaaagtttctctcgtttcctcaaagtttgtatttttaagagaagtgtgtgtgtagacaatctatgttttattggcttgtccttttttctggacatgtga

SEQ ID NO: 1226 - protein, 59 aa, Arabidopsis thaliana
RIPESFLQSRLLRPPSIKTLLYCMYGFQSFSRFLKVCIFKRSVCVDNLCFIGLSFFLDM

SEQ ID NO: 1227 - DNA, 459 bp, Arabidopsis thaliana
  source 1..459: mol_type = genomic DNA
taaaaacaatcaaacaaagtttcttctatgagttctggtctgaacgaagatttcctcgattgtatcgtgcgtttagaggagacacatgttcaacaaggcttcgatgagggttacgaagaaggtcttgtgtccggtcgtgaagacgctcgtcatctgggtttgaaactcgggttcgagacaggcgagctgattggattctacagaggttgctctgctctttggaattcagctctccgtattgatcctacacgcttctctcctcagctccataagcatctcaatgatttccatgtcttgctcgataaaatcccgcttttggatcccgaggacgaagctaaagacgggatcaaggatgatctcagagtcaaattcagcatcatttgtgcatctctcggcttttccaagaaacaatttgagtataaaggatacccgaatccttcctccaatctcgacttttaa

SEQ ID NO: 1228 - protein, 151 aa, Arabidopsis thaliana
KQSNKVSSMSSGLNEDFLDCIVRLEETHVQQGFDEGYEEGLVSGREDARHLGLKLGFETGELIGFYRGCSALWNSALRIDPTRFSPQLHKHLNDFHVLLDKIPLLDPEDEAKDGIKDDLRVKFSIICASLGFSKKQFEYKGYPNPSSNLDF

SEQ ID NO: 1229 - DNA, 129 bp, Arabidopsis thaliana
  source 1..129: mol_type = genomic DNA
tagcagcgaagcgcacacaaagtttgcttgccttctgggcttcacgattctcacgacatctgtttatcttctccgatttccacgtccatggatctcagtcaatgttccttaatctctcttttcgattag

SEQ ID NO: 1230 - protein, 41 aa, Arabidopsis thaliana
QRSAHKVCLPSGLHDSHDICLSSPISTSMDLSQCSLISLFD

SEQ ID NO: 1231 - DNA, 129 bp, Arabidopsis thaliana; identical to SEQ ID NO: 1229
  source 1..129: mol_type = genomic DNA

SEQ ID NO: 1232 - protein, 41 aa, Arabidopsis thaliana; identical to SEQ ID NO: 1230

SEQ ID NO: 1233 - DNA, 72 bp, Arabidopsis thaliana
  source 1..72: mol_type = genomic DNA
tgagagagccattggccaatttccagatatagacgacgacgacgacgaagcagcagcatgatgatggagtaa

SEQ ID NO: 1234 - protein, 22 aa, Arabidopsis thaliana
ESHWPISRYRRRRRRSSSMMME

SEQ ID NO: 1235 - DNA, 129 bp, Arabidopsis thaliana
  source 1..129: mol_type = genomic DNA
tgagaaagttcggtccgaattctaatcccacttttgtctctcaatttgtttcccctttctctctctctctctccttcaaatttttttagcgatttttctgggtttcatgtaaatgtgagaagtagatag

SEQ ID NO: 1236 - protein, 41 aa, Arabidopsis thaliana
ESSVRILIPLLSLNLFPLSLSLSPSNFFSDFSGFHVNVRSR

SEQ ID NO: 1237 - DNA, 51 bp, Arabidopsis thaliana
  source 1..51: mol_type = genomic DNA
tgaactttgagaaaagttattgagtttcgatatctgtcggtcatggtttga

SEQ ID NO: 1238 - protein, 15 aa, Arabidopsis thaliana
TLRKVIEFRYLSVMV

SEQ ID NO: 1239 - DNA, 93 bp, Arabidopsis thaliana
  source 1..93: mol_type = genomic DNA
tagctttctctggttcattttccatggacggaccttgacctctctgcttcccttcgtgcattttctctctctcactatcctctctctttctag

SEQ ID NO: 1240 - protein, 29 aa, Arabidopsis thaliana
LSLVHFPWTDLDLSASLRAFSLSHYPLSF

SEQ ID NO: 1241 - DNA, 93 bp, Arabidopsis thaliana; identical to SEQ ID NO: 1239
  source 1..93: mol_type = genomic DNA

SEQ ID NO: 1242 - protein, 29 aa, Arabidopsis thaliana
LSLVHFPWTDLDLSASLRAFSLSHYPLSF

SEQ ID NO: 1243 - DNA, 93 bp, Arabidopsis thaliana; identical to SEQ ID NO: 1239
  source 1..93: mol_type = genomic DNA

SEQ ID NO: 1244 - protein, 29 aa, Arabidopsis thaliana
LSLVHFPWTDLDLSASLRAFSLSHYPLSF

SEQ ID NO: 1245 - DNA, 252 bp, Arabidopsis thaliana
  source 1..252: mol_type = genomic DNA
taatacccttacttttgtagtttattactaaatttaccactccttccatgtttttgtttctctcttcttcttgattgttgcgcttttgttagctttctctggttcattttccatggacggaccttgacctctctgcttcccttcgtgcattttctctctctcactatcctctctctttctagtgtttgtttgatcctctgcgtactctgttcttcttctctcttcagggaaatgctgaagaagttagagtaa

SEQ ID NO: 1246 - protein, 82 aa, Arabidopsis thaliana
YPYFCSLLLNLPLLPCFCFSLLLDCCAFVSFLWFIFHGRTLTSLLPFVHFLSLTILSLSSVCLILCVLCSSSLFREMLKKLE

SEQ ID NO: 1247 - DNA, 99 bp, Arabidopsis thaliana
  source 1..99: mol_type = genomic DNA
taaatttaccactccttccatgtttttgtttctctcttcttcttgattgttgcgcttttgttagctttctctggttcattttccatggacggaccttga

SEQ ID NO: 1248 - protein, 31 aa, Arabidopsis thaliana
IYHSFHVFVSLFFLIVALLLAFSGSFSMDGP

SEQ ID NO: 1249 - DNA, 150 bp, Arabidopsis thaliana
  source 1..150: mol_type = genomic DNA
tgaaaaatggaaaatattgagtatctgaatgagatccaagccgttgcggggaagctaatccacagctatggagtcccagttatgatcacgttgttcctaagatggctcgcgtccatcgttgcagtgtcagtcatgtctttcatattttaa

SEQ ID NO: 1250 - protein, 48 aa, Arabidopsis thaliana
KMENIEYLNEIQAVAGKLIHSYGVPVMITLFLRWLASIVAVSVMSFIF

SEQ ID NO: 1251 - DNA, 126 bp, Arabidopsis thaliana
  source 1..126: mol_type = genomic DNA
taaactcagatttgtttttttttttcaatggtagaagaagacaagtgttcttggagtttagtttcttcttatgattcattcataaatccgaggaaatatatcaaatctgtttctttctttctctaa

SEQ ID NO: 1252 - protein, 40 aa, Arabidopsis thaliana
TQICFFFSMVEEDKCSWSLVSSYDSFINPRKYIKSVSFFL

SEQ ID NO: 1253 - DNA, 72 bp, Arabidopsis thaliana
  source 1..72: mol_type = genomic DNA
taatcactttctttctctgtctctctctctcgtgataatgaaaccggcggtgaactcttgatttccgattag

SEQ ID NO: 1254 - protein, 22 aa, Arabidopsis thaliana
SLSFSVSLSRDNETGGELLISD

SEQ ID NO: 1255 - DNA, 93 bp, Arabidopsis thaliana
  source 1..93: mol_type = genomic DNA
taattgtgttatctgaggcttctagacgccggattcatcaaaacgaaagacggtgaagaccatcggcggaagagaaacccaatcggagaatag

SEQ ID NO: 1256 - protein, 29 aa, Arabidopsis thaliana
LCYLRLLDAGFIKTKDGEDHRRKRNPIGE

SEQ ID NO: 1257 - DNA, 72 bp, Arabidopsis thaliana; identical to SEQ ID NO: 1253
  source 1..72: mol_type = genomic DNA

SEQ ID NO: 1258 - protein, 22 aa, Arabidopsis thaliana
SLSFSVSLSRDNETGGELLISD

SEQ ID NO: 1259 - DNA, 114 bp, Arabidopsis thaliana
  source 1..114: mol_type = genomic DNA
tgaacagaagttgatgtcgctctgttttttggcggggctacaaaatttgtacacattgaagagaggtcttctcttctttgctacctttttttgttagcagccatggctgagtga

SEQ ID NO: 1260 - protein, 36 aa, Arabidopsis thaliana
TEVDVALFFGGATKFVHIEERSSLLCYLFLLAAMAE

SEQ ID NO: 1261 - DNA, 117 bp, Arabidopsis thaliana
  source 1..117: mol_type = genomic DNA
tagcagccatggctgagtgaatattcttccacctgtctgagagaagggtattctgatttgctcaataatacttatatgtttttaattttgattaattctgttcaattggtagtctga

SEQ ID NO: 1262 - protein, 37 aa, Arabidopsis thaliana
QPWLSEYSSTCLREGYSDLLNNTYMFLILINSVQLVV

SEQ ID NO: 1263 - DNA, 54 bp, Arabidopsis thaliana
  source 1..54: mol_type = genomic DNA
tgaagagaggtcttctcttctttgctacctttttttgttagcagccatggctga

SEQ ID NO: 1264 - protein, 16 aa, Arabidopsis thaliana
REVFSSLLPFFVSSHG

SEQ ID NO: 1265 - DNA, 69 bp, Arabidopsis thaliana
  source 1..69: mol_type = genomic DNA
taaggcgctggtctacgaaaccagagattctgggttcgatccccagcagagtcgatttctttttgctaa

SEQ ID NO: 1266 - protein, 21 aa, Arabidopsis thaliana
GAGLRNQRFWVRSPAESISFC

SEQ ID NO: 1267 - DNA, 66 bp, Arabidopsis thaliana
  source 1..66: mol_type = genomic DNA
tgagatttggctttgcattgtatggatttgggaattgctaaaaaggggaagtttagatttgtttga

SEQ ID NO: 1268 - protein, 20 aa, Arabidopsis thaliana
DLALHCMDLGIAKKGKFRFV

SEQ ID NO: 1269 - DNA, 159 bp, Arabidopsis thaliana
  source 1..159: mol_type = genomic DNA
taaggaaccgaacaagattcatcatttagtttcgtgaagttggcgttgcgctgtttcttctttgagaggggttttggttctgatgaagatgagatttggctttgcattgtatggatttgggaattgctaaaaaggggaagtttagatttgtttgagtga

SEQ ID NO: 1270 - protein, 51 aa, Arabidopsis thaliana
GTEQDSSFSFVKLALRCFFFERGFGSDEDEIWLCIVWIWELLKRGSLDLFE

SEQ ID NO: 1271 - DNA, 54 bp, Arabidopsis thaliana
  source 1..54: mol_type = genomic DNA
tgaagatttactcactcaaagtcgctacctttaggtttctcaagatgggtttag

SEQ ID NO: 1272 - protein, 16 aa, Arabidopsis thaliana
RFTHSKSLPLGFSRWV

SEQ ID NO: 1273 - DNA, 66 bp, Arabidopsis thaliana
  source 1..66: mol_type = genomic DNA
tgaagtctgaagatttactcactcaaagtcgctacctttaggtttctcaagatgggtttagcttaa

SEQ ID NO: 1274 - protein, 20 aa, Arabidopsis thaliana
SLKIYSLKVATFRFLKMGLA

SEQ ID NO: 1275 - DNA, 192 bp, Arabidopsis thaliana
  source 1..192: mol_type = genomic DNA
tgacgctcttctttgtctctatcggtcttctctactttgttaaaagaacggcagccaagtacttcgaggtcggtggtggctccggtggtttcgatagagaccatcgccgagatttcatggtttccgacacggctgaatgttctgtctgtgggaaggctactaccaaaaagtgctctcgctgcaaatctgtga

SEQ ID NO: 1276 - protein, 62 aa, Arabidopsis thaliana
RSSLSLSVFSTLLKERQPSTSRSVVAPVVSIETIAEISWFPTRLNVLSVGRLLPKSALAANL

SEQ ID NO: 1277 - DNA, 54 bp, Arabidopsis thaliana
  source 1..54: mol_type = genomic DNA
tgaaatggcttcgtactctccatcttattcgctatccatacctcagagctctga

SEQ ID NO: 1278 - protein, 16 aa, Arabidopsis thaliana
NGFVLSILFAIHTSEL

SEQ ID NO: 1279 - DNA, 141 bp, Arabidopsis thaliana
  source 1..141: mol_type = genomic DNA
tgagtaagaacgaagaagatgtgtctccttctcttgaaggtctcactgagaaagagatcaatactcttaatgattgggagaccaaatttgaagctaagtatcctgtcgttggccgtgttgtctcttaggtctctcttctga

SEQ ID NO: 1280 - protein, 45 aa, Arabidopsis thaliana
VRTKKMCLLLLKVSLRKRSILLMIGRPNLKLSILSLAVLSLRSLF

SEQ ID NO: 1281 - DNA, 111 bp, Arabidopsis thaliana
  source 1..111: mol_type = genomic DNA
taactcttttgcttaagcctcaaaaaattgtcattaacccaatttcccagaaacttcaaaaacagttgggggaagaagaagaagatgaaacgacgaagaacccttttataa

SEQ ID NO: 1282 - protein, 35 aa, Arabidopsis thaliana
LFCLSLKKLSLTQFPRNFKNSWGKKKKMKRRRTLL

SEQ ID NO: 1283 - DNA, 327 bp, Arabidopsis thaliana
  source 1..327: mol_type = genomic DNA
tgagtgacactaataagcaaaataagagggaatattaagatgacatctactatggttctattcctccttcttcttcttgtgtttccgcatatggataaagccctaggcgcacacgaggaatcccagaaacaaggtgcagaaaagacttaccatgatgcacgctttactattcctattaagccaaaatatattcctaaggttatacgccctacgccaaaagatccgcctattccggaatgtcttcgaaaaggcacatgtagtcgtcttcatttatctcctcctccgccccagaggtctttcaaaggcacaaacgaacctggtcattga

SEQ ID NO: 1284 - protein, 107 aa, Arabidopsis thaliana
VTLISKIRGNIKMTSTMVLFLLLLLVFPHMDKALGAHEESQKQGAEKTYHDARFTIPIKPKYIPKVIRPTPKDPPIPECLRKGTCSRLHLSPPPPQRSFKGTNEPGH

SEQ ID NO: 1285 - DNA, 72 bp, Arabidopsis thaliana
  source 1..72: mol_type = genomic DNA
tagtcctttgtccttgttgcaaacgatggcagaaacgaagaagatgatcatcctcaagagctccgacggtga

SEQ ID NO: 1286 - protein, 22 aa, Arabidopsis thaliana
SFVLVANDGRNEEDDHPQELRR

SEQ ID NO: 1287 - DNA, 57 bp, Arabidopsis thaliana
  source 1..57: mol_type = genomic DNA
tgatctcatccaagagggtggaatattgctcaaactgtatcctttttcttggtctaa

SEQ ID NO: 1288 - protein, 17 aa, Arabidopsis thaliana
SHPRGWNIAQTVSFFLV

SEQ ID NO: 1289 - DNA, 135 bp, Arabidopsis thaliana
  source 1..135: mol_type = genomic DNA
taaaccaaaaaatggcagatcagctcaccgatgatcagatctctgagttcaaggaagcttttagccttttcgacaaagacggagatggttcttctctctcagatctttcctcttttgtataattttcattcataa

SEQ ID NO: 1290 - protein, 43 aa, Arabidopsis thaliana
TKKWQISSPMIRSLSSRKLLAFSTKTEMVLLSQIFPLLYNFHS

SEQ ID NO: 1291 - DNA, 159 bp, Arabidopsis thaliana
  source 1..159: mol_type = genomic DNA
tgattcttcttcttcttcttcttctctctttctcatctaaaccaaaaaatggcagatcagctcaccgatgatcagatctctgagttcaaggaagcttttagccttttcgacaaagacggagatggttcttctctctcagatctttcctcttttgtataa

SEQ ID NO: 1292 - protein, 51 aa, Arabidopsis thaliana
FFFFFFFSLSHLNQKMADQLTDDQISEFKEAFSLFDKDGDGSSLSDLSSFV

SEQ ID NO: 1293 - DNA, 90 bp, Arabidopsis thaliana
  source 1..90: mol_type = genomic DNA
taagttcacatggtgtgttttaaagttccttcttttttactcaatttcgaagctttgtgtctgttttatcaaataatgatgagaaattga

SEQ ID NO: 1294 - protein, 28 aa, Arabidopsis thaliana
VHMVCFKVPSFLLNFEALCLFYQIMMRN

SEQ ID NO: 1295 - DNA, 78 bp, Arabidopsis thaliana
  source 1..78: mol_type = genomic DNA
tgaatctcttcttcctcgcgaacgactgagaagaagcaggagtttaatttcctccggtcgaatctgaaaacgaaatag

SEQ ID NO: 1296 - protein, 24 aa, Arabidopsis thaliana
ISSSSRTTEKKQEFNFLRSNLKTK

SEQ ID NO: 1297 - DNA, 54 bp, Arabidopsis thaliana
  source 1..54: mol_type = genomic DNA
taattttcttcaagttttatcaatggctggtgttactggaatcttaaagcttga

SEQ ID NO: 1298 - protein, 16 aa, Arabidopsis thaliana
FSSSFINGWCYWNLKA

SEQ ID NO: 1299 - DNA, 132 bp, Arabidopsis thaliana
  source 1..132: mol_type = genomic DNA
taaagcagagaaaaaacaaagacaaataatctccatttgctttcttctccatcttcttctaattttcttcaagttttatcaatggctggtgttactggaatcttaaagcttgaagcttggagcatcttgtga

SEQ ID NO: 1300 - protein, 42 aa, Arabidopsis thaliana
SREKTKTNNLHLLSSPSSSNFLQVLSMAGVTGILKLEAWSIL

SEQ ID NO: 1301 - DNA, 54 bp, Arabidopsis thaliana; identical to SEQ ID NO: 1297
  source 1..54: mol_type = genomic DNA

SEQ ID NO: 1302 - protein, 16 aa, Arabidopsis thaliana
FSSSFINGWCYWNLKA

SEQ ID NO: 1303 - DNA, 171 bp, Arabidopsis thaliana
  source 1..171: mol_type = genomic DNA
tagtttcttgtatttttcttttctggggttttgagtttttttttctcttccttattaccggaagtaatggcatgtcggagtatgatcgcttttagtttagatcctgaaagaaaacaaagtggaggacttaggacaaaacaagctggaagaggatcttgccgtggaatttga

SEQ ID NO: 1304 - protein, 55 aa, Arabidopsis thaliana
FLVFFFSGVLSFFFSSLLPEVMACRSMIAFSLDPERKQSGGLRTKQAGRGSCRGI

SEQ ID NO: 1305 - DNA, 132 bp, Arabidopsis thaliana; identical to SEQ ID NO: 1299
  source 1..132: mol_type = genomic DNA

SEQ ID NO: 1306 - protein, 42 aa, Arabidopsis thaliana; identical to SEQ ID NO: 1300

SEQ ID NO: 1307 - DNA, 171 bp, Arabidopsis thaliana
  source 1..171: mol_type = genomic DNA
tagtttcttgtatttttcttttctggggttttgagtttttttttctcttccttattaccggaagtaatggcatgtcggagtatgatcgcttttagtttagatcctgaaagaaaacaaagtggaggacttaggacaaaacaagctggaagaggatcttgccgtggaagttag

SEQ ID NO: 1308 - protein, 55 aa, Arabidopsis thaliana
FLVFFFSGVLSFFFSSLLPEVMACRSMIAFSLDPERKQSGGLRTKQAGRGSCRGS

SEQ ID NO: 1309 - DNA, 81 bp, Arabidopsis thaliana
  source 1..81: mol_type = genomic DNA
taggacaaaacaagctggaagaggatcttgccgtggaagttagtctttgttcaaatccattttcctcttaaagaattttga

SEQ ID NO: 1310 - protein, 25 aa, Arabidopsis thaliana
DKTSWKRILPWKLVFVQIHFPLKEF

SEQ ID NO: 1311 - DNA, 102 bp, Arabidopsis thaliana
  source 1..102: mol_type = genomic DNA
tagatcctgaaagaaaacaaagtggaggacttaggacaaaacaagctggaagaggatcttgccgtggaagttagtctttgttcaaatccattttcctcttaa

SEQ ID NO: 1312 - protein, 32 aa, Arabidopsis thaliana
ILKENKVEDLGQNKLEEDLAVEVSLCSNPFSS

SEQ ID NO: 1313 - DNA, 132 bp, Arabidopsis thaliana; identical to SEQ ID NO: 1299
  source 1..132: mol_type = genomic DNA

SEQ ID NO: 1314 - protein, 42 aa, Arabidopsis thaliana; identical to SEQ ID NO: 1300

SEQ ID NO: 1315 - DNA, 138 bp, Arabidopsis thaliana
  source 1..138: mol_type = genomic DNA
taatcgtcgattctgctacattcttccggattctcagctgctgaaatctccgttttcatgggcttctacagccatcacgtccttcctcattcttgccatcgatcaagctcttactttctcagttctcagtgtcgatag

SEQ ID NO: 1316 - protein, 44 aa, Arabidopsis thaliana
SSILLHSSGFSAAEISVFMGFYSHHVLPHSCHRSSSYFLSSQCR

SEQ ID NO: 1317 - DNA, 141 bp, Arabidopsis thaliana
  source 1..141: mol_type = genomic DNA
tgacaattttgtattgattcaatatcatttatggtgtcagatggttgttgtttttctatctctgattgttgttatatgggtggcttctttcttcaaaattttcttccgagctacatctatctccagagccactattcttga

SEQ ID NO: 1318 - protein, 45 aa, Arabidopsis thaliana
QFCIDSISFMVSDGCCFSISDCCYMGGFFLQNFLPSYIYLQSHYS

SEQ ID NO: 1319 - DNA, 132 bp, Arabidopsis thaliana
  source 1..132: mol_type = genomic DNA
tgaaatctccgttttcatgggcttctacagccatcacgtccttcctcattcttgccatcgatcaagctcttactttctcagttctcagtgtcgatagattctcttctttggtttagctgttccactctctga

SEQ ID NO: 1320 - protein, 42 aa, Arabidopsis thaliana
NLRFHGLLQPSRPSSFLPSIKLLLSQFSVSIDSLLWFSCSTL

SEQ ID NO: 1321 - DNA, 177 bp, Arabidopsis thaliana
  source 1..177: mol_type = genomic DNA
taaaaaaaaaaaaaacatttcctctcaatttttttttcaatcaaacaaaaaaaaatcatcgctcccaattttacattcttcttctcgccaaaccctaattgtttcgatttctgctacattcttccggaaacttgttctatctctgacggatctcgaatcggtattctcagctgctga

SEQ ID NO: 1322 - protein, 57 aa, Arabidopsis thaliana
KKKKHFLSIFFSIKQKKIIAPNFTFFFSPNPNCFDFCYILPETCSISDGSRIGILSC

SEQ ID NO: 1323 - DNA, 63 bp, Arabidopsis thaliana
  source 1..63: mol_type = genomic DNA
taagaaaacaatgtagatctatggagggagaaacaagggggttttagaaacaagaaagtgtaa

SEQ ID NO: 1324 - protein, 19 aa, Arabidopsis thaliana
ENNVDLWREKQGGFRNKKV

SEQ ID NO: 1325 - DNA, 66 bp, Arabidopsis thaliana
  source 1..66: mol_type = genomic DNA
taacaatttcataaaattcatagccaccggttaaacctggacccaataccgaactcacacacataa

SEQ ID NO: 1326 - protein, 20 aa, Arabidopsis thaliana
QFHKIHSHRLNLDPIPNSHT

SEQ ID NO: 1327 - DNA, 159 bp, Arabidopsis thaliana
  source 1..159: mol_type = genomic DNA
taagttttaacctcacggaaggaatctttattctgcaatcactgcaaagagaaggagtctatattttggtggagaatgttgttggacgataataaacatatgatttcagtgcaacgcggctttaagagtcgtggtcagatgaaatatctgaggtattga

SEQ ID NO: 1328 - protein, 51 aa, Arabidopsis thaliana
VLTSRKESLFCNHCKEKESIFWWRMLLDDNKHMISVQRGFKSRGQMKYLRY

SEQ ID NO: 1329 - DNA, 195 bp, Arabidopsis thaliana
  source 1..195: mol_type = genomic DNA
taagagacatggaagccactgaaacggttctttgcacgttgcttgccgtcgacctcacagattattgctatagagtttgttctcgctgccagagagttcttccttcagataacaatggctttgcttcttcttcattttgcaaattctgcaaatcaaaagaaccaaaacttctctatcggattctcatgtcaatag

SEQ ID NO: 1330 - protein, 63 aa, Arabidopsis thaliana
ETWKPLKRFFARCLPSTSQIIAIEFVLAAREFFLQITMALLLLHFANSANQKNQNFSIGFSCQ

SEQ ID NO: 1331 - DNA, 60 bp, Arabidopsis thaliana
  source 1..60: mol_type = genomic DNA
tagaaacacaacaaagataacaatcacaaggacactaaaggaagagcagcaactacatga

SEQ ID NO: 1332 - protein, 18 aa, Arabidopsis thaliana
KHNKDNNHKDTKGRAATT

SEQ ID NO: 1333 - DNA, 81 bp, Arabidopsis thaliana
  source 1..81: mol_type = genomic DNA
taaaaatttcgatctccactaccttcgtcatcttcctctacttctgattctcttttctgggtttgtcgtttaatgggttga

SEQ ID NO: 1334 - protein, 25 aa, Arabidopsis thaliana
KFRSPLPSSSSSTSDSLFWVCRLMG

SEQ ID NO: 1335 - DNA, 66 bp, Arabidopsis thaliana
  source 1..66: mol_type = genomic DNA
taaaccctccaacgattttccatgattcgaagatacagagccttagcgatgaagaaaaagccctaa

SEQ ID NO: 1336 - protein, 20 aa, Arabidopsis thaliana
TLQRFSMIRRYRALAMKKKP

SEQ ID NO: 1337 - DNA, 111 bp, Arabidopsis thaliana
  source 1..111: mol_type = genomic DNA
tgaatcatcggagagagtgggaaacatggagaaaaacaagagagctatcggatttttacttctggtcgtacttatcaatggagttatgatgacgagatcaaatgggtatga

SEQ ID NO: 1338 - protein, 35 aa, Arabidopsis thaliana
IIGESGKHGEKQESYRIFTSGRTYQWSYDDEIKWV

SEQ ID NO: 1339 - DNA, 72 bp, Arabidopsis thaliana
  source 1..72: mol_type = genomic DNA
taaattcttctccattctcttcttcctcccgatcatctcgagctcttcgtgagagattatgtgattatgtaa

SEQ ID NO: 1340 - protein, 22 aa, Arabidopsis thaliana
ILLHSLLPPDHLELFVRDYVIM

SEQ ID NO: 1341 - DNA, 99 bp, Arabidopsis thaliana
  source 1..99: mol_type = genomic DNA
tgagttttaaagatccatcaaactttattaaagaaagaagaacaaagagataaaagggaagaagaacaatggttttctcatccgtctcaagctttttag

SEQ ID NO: 1342 - protein, 31 aa, Arabidopsis thaliana
VLKIHQTLLKKEEQRDKREEEQWFSHPSQAF

SEQ ID NO: 1343 - DNA, 60 bp, Arabidopsis thaliana
  source 1..60: mol_type = genomic DNA
taacctttggttcccttctttcgtttttatatgattctcccaccatttttgttcttttga

SEQ ID NO: 1344 - protein, 18 aa, Arabidopsis thaliana
PLVPFFRFYMILPPFLFF

SEQ ID NO: 1345 - DNA, 132 bp, Arabidopsis thaliana
  source 1..132: mol_type = genomic DNA
taggctcagtatcggatttttcgtcaacactataaaacccatttttctatctctctgtctaaaagtctttactttaaaacaaacagtgacatgaaaaatcaaagcttcgatacaatctcaggatggatttga

SEQ ID NO: 1346 - protein, 42 aa, Arabidopsis thaliana
AQYRIFRQHYKTHFSISLSKSLYFKTNSDMKNQSFDTISGWI

SEQ ID NO: 1347 - DNA, 57 bp, Arabidopsis thaliana
  source 1..57: mol_type = genomic DNA
tgacatgaaaaatcaaagcttcgatacaatctcaggatggatttgagtatcgcttaa

SEQ ID NO: 1348 - protein, 17 aa, Arabidopsis thaliana
HEKSKLRYNLRMDLSIA

SEQ ID NO: 1349 - DNA, 132 bp, Arabidopsis thaliana; identical to SEQ ID NO: 1345
  source 1..132: mol_type = genomic DNA

SEQ ID NO: 1350 - protein, 42 aa, Arabidopsis thaliana; identical to SEQ ID NO: 1346

SEQ ID NO: 1351 - DNA, 162 bp, Arabidopsis thaliana
  source 1..162: mol_type = genomic DNA
tagataaagatggataacagccgatggagtcttcaaggtatgactgctcttctgaccggtggagcgggaggaattgggcatgccatagtagaggagctagctggttttgggccaaagtccatgtatccgacatatctgaaacactgctcaatcaaagtttaa

SEQ ID NO: 1352 - protein, 52 aa, Arabidopsis thaliana
IKMDNSRWSLQGMTALLTGGAGGIGHAIVEELAGFGPKSMYPTYLKHCSIKV

SEQ ID NO: 1353 - DNA, 72 bp, Arabidopsis thaliana
  source 1..72: mol_type = genomic DNA
tgaaacactgctcaatcaaagtttaagcgaatgggaaaagaaaggatttcaagtgagtggtacaatctgtga

SEQ ID NO: 1354 - protein, 22 aa, Arabidopsis thaliana
NTAQSKFKRMGKERISSEWYNL

SEQ ID NO: 1355 - DNA, 162 bp, Arabidopsis thaliana; identical to SEQ ID NO: 1351
  source 1..162: mol_type = genomic DNA

SEQ ID NO: 1356 - protein, 52 aa, Arabidopsis thaliana; identical to SEQ ID NO: 1352

SEQ ID NO: 1357 - DNA, 102 bp, Arabidopsis thaliana
  source 1..102: mol_type = genomic DNA
taaaattctcgtagaagcttttcccttcacctaaaaattcttcaactcgcggtgcctcaccgtcgtcaaccacctcatcgctcaattgcagatactccataa

SEQ ID NO: 1358 - protein, 32 aa, Arabidopsis thaliana
NSRRSFSLHLKILQLAVPHRRQPPHRSIADTP

SEQ ID NO: 1359 - DNA, 159 bp, Arabidopsis thaliana
  source 1..159: mol_type = genomic DNA
taattatgggtttcgagagaacatcatcatcattatcattattatcatcatcattaccatcatcattacaaccatcagaaaacacgagagccaagttcagtctcttctatttattgctactcttcttcgtcctctgtgtcattgccaccttcactataa

SEQ ID NO: 1360 - protein, 51 aa, Arabidopsis thaliana
LWVSREHHHHYHYYHHHYHHHYNHQKTREPSSVSSIYCYSSSSSVSLPPSL

SEQ ID NO: 1361 - DNA, 99 bp, Arabidopsis thaliana
  source 1..99: mol_type = genomic DNA
taatcttttcttgatttccattttcatctcaagttttttaaaaacccaccaagttttttttttcgcatggatgaggagatcataactaatctctgctag

SEQ ID NO: 1362 - protein, 31 aa, Arabidopsis thaliana
SFLDFHFHLKFFKNPPSFFFRMDEEIITNLC

SEQ ID NO: 1363 - DNA, 126 bp, Arabidopsis thaliana
  source 1..126: mol_type = genomic DNA
tagagaaccaaaaaaaatggcaacagaaggaaaaaaccccatcaacatgaactctatgtcttcaagtcttgcaagaaccggtcaatgggttttttctcaagatattccgaccgatgttgttgttga

SEQ ID NO: 1364 - protein, 40 aa, Arabidopsis thaliana
RTKKNGNRRKKPHQHELYVFKSCKNRSMGFFSRYSDRCCC

SEQ ID NO: 1365 - DNA, 114 bp, Arabidopsis thaliana
  source 1..114: mol_type = genomic DNA
tgaactctatgtcttcaagtcttgcaagaaccggtcaatgggttttttctcaagatattccgaccgatgttgttgttgaagtcggagaagccaatttctctcttcataaggtaa

SEQ ID NO: 1366 - protein, 36 aa, Arabidopsis thaliana
TLCLQVLQEPVNGFFLKIFRPMLLLKSEKPISLFIR

SEQ ID NO: 1367 - DNA, 150 bp, Arabidopsis thaliana
  source 1..150: mol_type = genomic DNA
tgagtgattgctgaagccaacttaaaagagagagaagagaagagtgactctgtgtgtgtgtgcaagaaagtcttctctttcacacctttcgttttctcgaacctctcctttaaagatggtggaggaatcttgggtttgacaactcattaa

SEQ ID NO: 1368 - protein, 48 aa, Arabidopsis thaliana
VIAEANLKEREEKSDSVCVCKKVFSFTPFVFSNLSFKDGGGILGLTTH

SEQ ID NO: 1369 - DNA, 54 bp, Arabidopsis thaliana
  source 1..54: mol_type = genomic DNA
tgatcttcttcttataagagactcagagctgttcttcaagatgggattgtgtaa

SEQ ID NO: 1370 - protein, 16 aa, Arabidopsis thaliana
SSSYKRLRAVLQDGIV

SEQ ID NO: 1371 - DNA, 162 bp, Arabidopsis thaliana
  source 1..162: mol_type = genomic DNA
tagctctacaagcatccaaggaacccctcttacttttccctcttcttcattccctctctctctatatctcccaattccttctctttttttaaccttgatcttcttcttataagagactcagagctgttcttcaagatgggattgtgtaagcttgaaacttga

SEQ ID NO: 1372 - protein, 52 aa, Arabidopsis thaliana
LYKHPRNPSYFSLFFIPSLSISPNSFSFFNLDLLLIRDSELFFKMGLCKLET

SEQ ID NO: 1373 - DNA, 117 bp, Arabidopsis thaliana
  source 1..117: mol_type = genomic DNA
taaaagagagagaagagaagagtgactctgtgtgtgtgtgcaagaaagtcttctctttcacacctttcgttttctcgaacctctcctttaaagatggtggaggaatcttgggtttga

SEQ ID NO: 1374 - protein, 37 aa, Arabidopsis thaliana
KREKRRVTLCVCARKSSLSHLSFSRTSPLKMVEESWV

SEQ ID NO: 1375 - DNA, 63 bp, Arabidopsis thaliana
  source 1..63: mol_type = genomic DNA
tgatgtactctgcatctgattgttttgctcgtgttttattaccacgttgtggttgaaatttga

SEQ ID NO: 1376 - protein, 19 aa, Arabidopsis thaliana
CTLHLIVLLVFYYHVVVEI

SEQ ID NO: 1377 - DNA, 63 bp, Arabidopsis thaliana
  source 1..63: mol_type = genomic DNA
taaaagttgatgtactctgcatctgattgttttgctcgtgttttattaccacgttgtggttga

SEQ ID NO: 1378 - protein, 19 aa, Arabidopsis thaliana
KLMYSASDCFARVLLPRCG

SEQ ID NO: 1379 - DNA, 249 bp, Arabidopsis thaliana
  source 1..249: mol_type = genomic DNA
tgaaactgggtgtttccgaccgtcgaatcggattcgactagatatgaactgggttcaacgaaaaatctacctttacaacgtcaccttcgggctttacatgctcgattggtgggaacgatacctattcaattctttagtgttaatcttgatgtggtttattctgtacaatggatctcgttacttttccgagctttgcaagaggcatctttcatgaaaccaggtcataatcatcacgccatggaatcgtga

SEQ ID NO: 1380 - protein, 81 aa, Arabidopsis thaliana
NWVFPTVESDSTRYELGSTKNLPLQRHLRALHARLVGTIPIQFFSVNLDVVYSVQWISLLFRALQEASFMKPGHNHHAMES

SEQ ID NO: 1381 - DNA, 180 bp, Arabidopsis thaliana
  source 1..180: mol_type = genomic DNA
tgaccttcctctctctctgtccctcgtccttcttcttcttcttcttcttcttcttcttcctcctccttcctcgatagagccttctccgattatgctctgtgtcctcattgttatctccgtgcagaaacaagagcagatgggtctaattctacaccaatcaaagctttgttctcgatttag

SEQ ID NO: 1382 - protein, 58 aa, Arabidopsis thaliana
PSSLSVPRPSSSSSSSSSSSSFLDRAFSDYALCPHCYLRAETRADGSNSTPIKALFSI

SEQ ID NO: 1383 - DNA, 75 bp, Arabidopsis thaliana
  source 1..75: mol_type = genomic DNA
taattctacaccaatcaaagctttgttctcgatttagaaagcctcttttggggtaaagagatggtgagaaaataa

SEQ ID NO: 1384 - protein, 23 aa, Arabidopsis thaliana
FYTNQSFVLDLESLFWGKEMVRK

SEQ ID NO: 1385 - DNA, 120 bp, Arabidopsis thaliana
  source 1..120: mol_type = genomic DNA
tagagccttctccgattatgctctgtgtcctcattgttatctccgaaacaagagcagatgggtctaattctacaccaatcaaagctttgttctcgatttagaaagcctcttttggggtaa

SEQ ID NO: 1386 - protein, 38 aa, Arabidopsis thaliana
SLLRLCSVSSLLSPKQEQMGLILHQSKLCSRFRKPLLG

SEQ ID NO: 1387 - DNA, 99 bp, Arabidopsis thaliana
  source 1..99: mol_type = genomic DNA
tgatttgggtatgttgggtcattgaatcttgtgactgccatggcagatcttttggggatctgcatagaagagttgcttcttgtagcagctttcaggtag

SEQ ID NO: 1388 - protein, 31 aa, Arabidopsis thaliana
FGYVGSLNLVTAMADLLGICIEELLLVAAFR

SEQ ID NO: 1389 - DNA, 138 bp, Arabidopsis thaliana
  source 1..138: mol_type = genomic DNA
taatccgattcaaagtttgtatctttgggagggatgggtaagaggcaaatatcacaagatgaagtaggtccgcccataaaaccaagagctggtttacgaagggaacaagctggaagaggttcttacagaggtagttag

SEQ ID NO: 1390 - protein, 44 aa, Arabidopsis thaliana
SDSKFVSLGGMGKRQISQDEVGPPIKPRAGLRREQAGRGSYRGS

SEQ ID NO: 1391 - DNA, 75 bp, Arabidopsis thaliana
  source 1..75: mol_type = genomic DNA
tgaagtaggtccgcccataaaaccaagagctggtttacgaagggaacaagctggaagaggttcttacagaggtag

SEQ ID NO: 1392 - protein, 23 aa, Arabidopsis thaliana
SRSAHKTKSWFTKGTSWKRFLQR

SEQ ID NO: 1393 - DNA, 75 bp, Arabidopsis thaliana; identical to SEQ ID NO: 1391
  source 1..75: mol_type = genomic DNA

SEQ ID NO: 1394 - protein, 23 aa, Arabidopsis thaliana
SRSAHKTKSWFTKGTSWKRFLQR

SEQ ID NO: 1395 - DNA, 138 bp, Arabidopsis thaliana; identical to SEQ ID NO: 1389
  source 1..138: mol_type = genomic DNA

SEQ ID NO: 1396 - protein, 44 aa, Arabidopsis thaliana; identical to SEQ ID NO: 1390

SEQ ID NO: 1397 - DNA, 273 bp, Arabidopsis thaliana
  source 1..273: mol_type = genomic DNA
tgaaagcgaagatgggtggaggaatggaaacgaacaagaacaagttcatcgaggactggggatctgctagagagaatctcgagcacaatttccgctggactcgtcgtaacttcgctctcatcggaatcttcggcatcgctctcccgatcattgtctacaagggaatcgtcaaagatttccatatgcaagatgaagatgcaggcagaccacacagaaagttcctctgaggttgtttgcaagaacactctctgcaataaagtctcagcaatgtga

SEQ ID NO: 1398 - protein, 89 aa, Arabidopsis thaliana
KRRWVEEWKRTRTSSSRTGDLLERISSTISAGLVVTSLSSESSASLSRSLSTRESSKISICKMKMQADHTESSSEVVCKNTLCNKVSAM

SEQ ID NO: 1399 - DNA, 219 bp, Arabidopsis thaliana
  source 1..219: mol_type = genomic DNA
taatctacacctctacatacgattttcattaaacacttttcaaaaacaaatcataatctgttcgaagatgagccaatacagccaaaaccaatcttcaggagcttatcctacgccgccagtgtctaccggcccttatatgacaccgccaccgctcggttacccgacgagcgacatcagtcatgccacggtggctccggtggagacaaagtccaagggtga

SEQ ID NO: 1400 - protein, 71 aa, Arabidopsis thaliana
STPLHTIFIKHFSKTNHNLFEDEPIQPKPIFRSLSYAASVYRPLYDTATARLPDERHQSCHGGSGGDKVQG

SEQ ID NO: 1401 - DNA, 63 bp, Arabidopsis thaliana
  source 1..63: mol_type = genomic DNA
taattcttgggagaaagtattagtctcgtcttctcagtgtggcttgatgatgttcatatctga

SEQ ID NO: 1402 - protein, 19 aa, Arabidopsis thaliana
FLGESISLVFSVWLDDVHI

SEQ ID NO: 1403 - DNA, 201 bp, Arabidopsis thaliana
  source 1..201: mol_type = genomic DNA
tgaaatgaagatctctccttcttcatttgttttttttgggggtttttgaattttgatagcagaactaagaagctttgcgtgaatatgcttctctctctgctaatatttgcttgtggttgggttttgttttaccgggtctgggagattttgttgtaccagcccttgcttgtaggtcaagcaattgtccagatattgtattaa

SEQ ID NO: 1404 - protein, 65 aa, Arabidopsis thaliana
NEDLSFFICFFWGFLNFDSRTKKLCVNMLLSLLIFACGWVLFYRVWEILLYQPLLVGQAIVQILY

SEQ ID NO: 1405 - DNA, 141 bp, Arabidopsis thaliana
  source 1..141: mol_type = genomic DNA
taagaagctttgcgtgaatatgcttctctctctgctaatatttgcttgtggttgggttttgttttaccgggtctgggagattttgttgtaccagcccttgcttgtaggtcaagcaattgtccagatattgtattaaattaa

SEQ ID NO: 1406 - protein, 45 aa, Arabidopsis thaliana
EALREYASLSANICLWLGFVLPGLGDFVVPALACRSSNCPDIVLN

SEQ ID NO: 1407 - DNA, 57 bp, Arabidopsis thaliana
  source 1..57: mol_type = genomic DNA
taaccggttaatcggttaacagagttggaactagtgttatggatgatgaagatgtag

SEQ ID NO: 1408 - protein, 17 aa, Arabidopsis thaliana
PVNRLTELELVLWMMKM

SEQ ID NO: 1409 - DNA, 54 bp, Arabidopsis thaliana
  source 1..54: mol_type = genomic DNA
tgaagcgtttttgttgtgctttctcagattatccatgatcatgtgatgcactaa

SEQ ID NO: 1410 - protein, 16 aa, Arabidopsis thaliana
SVFVVLSQIIHDHVMH

SEQ ID NO: 1411 - DNA, 57 bp, Arabidopsis thaliana
  source 1..57: mol_type = genomic DNA
tgataccaccttgaagcgtttttgttgtgctttctcagattatccatgatcatgtga

SEQ ID NO: 1412 - protein, 17 aa, Arabidopsis thaliana
YHLEAFLLCFLRLSMIM

SEQ ID NO: 1413 - DNA, 81 bp, Arabidopsis thaliana
  source 1..81: mol_type = genomic DNA
tgaggttcttttagtcctcgcgaagccagatgctactctctattgcacgtctgtgacagaagagctcgattagggaactga

SEQ ID NO: 1414 - protein, 25 aa, Arabidopsis thaliana
GSFSPREARCYSLLHVCDRRARLGN

SEQ ID NO: 1415 - DNA, 72 bp, Arabidopsis thaliana
  source 1..72: mol_type = genomic DNA
taggaagatcgattttatcaatctcaattgaacaagatgtcgactctgttagctacatgtaaccaaaattga

SEQ ID NO: 1416 - protein, 22 aa, Arabidopsis thaliana
EDRFYQSQLNKMSTLLATCNQN

SEQ ID NO: 1417 - DNA, 75 bp, Arabidopsis thaliana
  source 1..75: mol_type = genomic DNA
taggaggctctgaagattgatgagctacttctttttgatgtatctgaatttaacctgatttttggttatgattaa

SEQ ID NO: 1418 - protein, 23 aa, Arabidopsis thaliana
EALKIDELLLFDVSEFNLIFGYD

SEQ ID NO: 1419 - DNA, 84 bp, Arabidopsis thaliana
  source 1..84: mol_type = genomic DNA
tgaaattttgcatctttttctgctcacgtagctctcgccaatgggggagacgaagcagggtggctcaaaaagggtatgatataa

SEQ ID NO: 1420 - protein, 26 aa, Arabidopsis thaliana
NFASFSAHVALANGGDEAGWLKKGMI

SEQ ID NO: 1421 - DNA, 51 bp, Arabidopsis thaliana
  source 1..51: mol_type = genomic DNA
tagctctcgccaatgggggagacgaagcagggtggctcaaaaagggtatga

SEQ ID NO: 1422 - protein, 15 aa, Arabidopsis thaliana
LSPMGETKQGGSKRV

SEQ ID NO: 1423 - DNA, 114 bp, Arabidopsis thaliana
  source 1..114: mol_type = genomic DNA
taagttggattaatctatattatcatttgtttttcagacaagagaaagagagatagagagaaagtgtctgatccatggctgcatctagagaatttattatatgttgcttcttaa

SEQ ID NO: 1424 - protein, 36 aa, Arabidopsis thaliana
VGLIYIIICFSDKRKRDREKVSDPWLHLENLLYVAS

SEQ ID NO: 1425 - DNA, 177 bp, Arabidopsis thaliana
  source 1..177: mol_type = genomic DNA
tgagactctaagcggtttatgaggagacggagatccggtgcagataacggagttgtgggatcgtttagatcgtgtccggcgagaaggtcccgaacattgatcgattcaaacaacgcgtctatctccggcatgacggagggacggtggtcgttgtcgtcggggctcttttccgattag

SEQ ID NO: 1426 - protein, 57 aa, Arabidopsis thaliana
DSKRFMRRRRSGADNGVVGSFRSCPARRSRTLIDSNNASISGMTEGRWSLSSGLFSD

SEQ ID NO: 1427 - DNA, 81 bp, Arabidopsis thaliana
  source 1..81: mol_type = genomic DNA
tgaggagacggagatccggtgcagataacggagttgtgggatcgtttagatcgtgtccggcgagaaggtcccgaacattga

SEQ ID NO: 1428 - protein, 25 aa, Arabidopsis thaliana
GDGDPVQITELWDRLDRVRREGPEH

SEQ ID NO: 1429 - DNA, 54 bp, Arabidopsis thaliana
  source 1..54: mol_type = genomic DNA
tgattccagatcataaccatgatctttgttgattccagaactttagctttttga

SEQ ID NO: 1430 - protein, 16 aa, Arabidopsis thaliana
FQIITMIFVDSRTLAF

SEQ ID NO: 1431 - DNA, 81 bp, Arabidopsis thaliana
  source 1..81: mol_type = genomic DNA
tagaacttcaagccaaagcaaaaaccttacttatcctttctccataaaatcaaaatccttattggaatatacactaattga

SEQ ID NO: 1432 - protein, 25 aa, Arabidopsis thaliana
NFKPKQKPYLSFLHKIKILIGIYTN

SEQ ID NO: 1433 - DNA, 54 bp, Arabidopsis thaliana
  source 1..54: mol_type = genomic DNA
taatggttagggagcttagggtttatgaatgatcaggtggtatttggtatttga

SEQ ID NO: 1434 - protein, 16 aa, Arabidopsis thaliana
WLGSLGFMNDQVVFGI

SEQ ID NO: 1435 - DNA, 132 bp, Arabidopsis thaliana
  source 1..132: mol_type = genomic DNA
taactttttctgggtttttcgagaatttcttcgaaaggatcttacggtaagagaaaaggaaaattaagagggaataagaagattcatcatcattgtcatctgtggggaatctcagagcttttttttctgtag

SEQ ID NO: 1436 - protein, 42 aa, Arabidopsis thaliana
LFLGFSRISSKGSYGKRKGKLRGNKKIHHHCHLWGISELFFL

SEQ ID NO: 1437 - DNA, 189 bp, Arabidopsis thaliana
  source 1..189: mol_type = genomic DNA
tgatacctaatcaaccactctcaacaccatccaaccaccacctccagagcaaagaaacagagcagacaacgaaacagagcagagaacgaaacagagagagagaaggagagaacgaaacagagagggaattctgttggttttgcaatggtttggaggttcgttaatggcgtcatagactcgggagattaa

SEQ ID NO: 1438 - protein, 61 aa, Arabidopsis thaliana
YLINHSQHHPTTTSRAKKQSRQRNRAENETEREKERTKQRGNSVGFAMVWRFVNGVIDSGD

SEQ ID NO: 1439 - DNA, 57 bp, Arabidopsis thaliana
  source 1..57: mol_type = genomic DNA
taagggagaacaagtactctgcatcttctggatttctcactatttctccttctctag

SEQ ID NO: 1440 - protein, 17 aa, Arabidopsis thaliana
GRTSTLHLLDFSLFLLL

SEQ ID NO: 1441 - DNA, 228 bp, Arabidopsis thaliana
  source 1..228: mol_type = genomic DNA
taagattctcttgtagtgtatatggagatcgatttgggagctaacgcgtttggtatcgacttccatccatcgacgaatctagtagctgctggtctcatcgatggccacttgcatctataccgatacgactcagattcttcacttgtcagggaacgtaaagttcgtgcccataaggagtcttgtagagctgttcggttcattgatgatggccaaagtttgttcctttaa

SEQ ID NO: 1442 - protein, 74 aa, Arabidopsis thaliana
DSLVVYMEIDLGANAFGIDFHPSTNLVAAGLIDGHLHLYRYDSDSSLVRERKVRAHKESCRAVRFIDDGQSLFL

SEQ ID NO: 1443 - DNA, 126 bp, Arabidopsis thaliana
  source 1..126: mol_type = genomic DNA
tgactcgataccatcttaaatgcagagtcttttcgtgataataaaattatggattcgtttcaaagttttttttttttcgtatggaaaacacttgagctctctcaatcttgtagtcttgactcttga

SEQ ID NO: 1444 - protein, 40 aa, Arabidopsis thaliana
LDTILNAESFRDNKIMDSFQSFFFFVWKTLELSQSCSLDS

SEQ ID NO: 1445 - DNA, 96 bp, Arabidopsis thaliana
  source 1..96: mol_type = genomic DNA
tgacgagccacaaaacaaaagcagaaaagagagcacttttgttactactatctctccaagcctttttgcctaattttgtttctgatgaatctctaa

SEQ ID NO: 1446 - protein, 30 aa, Arabidopsis thaliana
RATKQKQKREHFCYYYLSKPFCLILFLMNL

SEQ ID NO: 1447 - DNA, 201 bp, Arabidopsis thaliana
  source 1..201: mol_type = genomic DNA
taactcattcgcgagcttccttggtatgttctcgaaagcacatttagagatttgttatctgtaaactcatgctccttgaacactttttatctgcaagtgacgagccacaaaacaaaagcagaaaagagagcacttttgttactactatctctccaagcctttttgcctaattttgtttctgatgaatctctaacttcataa

SEQ ID NO: 1448 - protein, 65 aa, Arabidopsis thaliana
LIRELPWYVLESTFRDLLSVNSCSLNTFYLQVTSHKTKAEKRALLLLLSLQAFLPNFVSDESLTS

SEQ ID NO: 1449 - DNA, 69 bp, Arabidopsis thaliana
  source 1..69: mol_type = genomic DNA
tgatttaactcattcgcgagcttccttggtatgttctcgaaagcacatttagagatttgttatctgtaa

SEQ ID NO: 1450 - protein, 21 aa, Arabidopsis thaliana
FNSFASFLGMFSKAHLEICYL

SEQ ID NO: 1451 - DNA, 96 bp, Arabidopsis thaliana; identical to SEQ ID NO: 1445
  source 1..96: mol_type = genomic DNA

SEQ ID NO: 1452 - protein, 30 aa, Arabidopsis thaliana; identical to SEQ ID NO: 1446

SEQ ID NO: 1453 - DNA, 135 bp, Arabidopsis thaliana
  source 1..135: mol_type = genomic DNA
tgagctttggaccaatctttgaccttttttcgaacttgctgtttccgcgaatcaaagtctcgtccttttaccttcttcctcctaaagattttctccagaaatataaaaaaaggcgattcctttatggtgatttaa

SEQ ID NO: 1454 - protein, 43 aa, Arabidopsis thaliana
ALDQSLTFFRTCCFRESKSRPFTFFLLKIFSRNIKKGDSFMVI

SEQ ID NO: 1455 - DNA, 201 bp, Arabidopsis thaliana; identical to SEQ ID NO: 1447
  source 1..201: mol_type = genomic DNA

SEQ ID NO: 1456 - protein, 65 aa, Arabidopsis thaliana; identical to SEQ ID NO: 1448

SEQ ID NO: 1457 - DNA, 81 bp, Arabidopsis thaliana
  source 1..81: mol_type = genomic DNA
tgaattttcaatttatgtgagattttattccacaatcggaataattttcctggcaatggcgacgaccaatgctccacctga

SEQ ID NO: 1458 - protein, 25 aa, Arabidopsis thaliana
IFNLCEILFHNRNNFPGNGDDQCST

SEQ ID NO: 1459 - DNA, 216 bp, Arabidopsis thaliana
  source 1..216: mol_type = genomic DNA
taactccagattattatgcagctcctattgctcttctctctctggtcttcttcttcttcttcctcctccagttttctctgcaatcctcactttctctctctccccatctctctaaatgcagctacttctctttcatcactgctgattctccgtcttagctcccatttctccatgaagttctcgcagctactccgacgaattgtgctgtcgaggtga

SEQ ID NO: 1460 - protein, 70 aa, Arabidopsis thaliana
LQIIMQLLLLFSLWSSSSSSSSSFLCNPHFLSLPISLNAATSLSSLLILRLSSHFSMKFSQLLRRIVLSR

SEQ ID NO: 1461 - DNA, 120 bp, Arabidopsis thaliana
  source 1..120: mol_type = genomic DNA
tgaaggaaaaagcgagaaagatggctagaaacagtgacaatgatatgtgcaaagaagaacggaagagagagagcttcttcaaggttctacagagagttgatatttcttctgagaacatga

SEQ ID NO: 1462 - protein, 38 aa, Arabidopsis thaliana
RKKRERWLETVTMICAKKNGRERASSRFYRELIFLLRT

SEQ ID NO: 1463 - DNA, 96 bp, Arabidopsis thaliana
  source 1..96: mol_type = genomic DNA
tagcctcttcgtcttcaactttcttctctaactcttctctatccgtcagaacctctcagtttcgctcccgaaactctgtcttcgcttgtgttgtaa

SEQ ID NO: 1464 - protein, 30 aa, Arabidopsis thaliana
PLRLQLSSLTLLYPSEPLSFAPETLSSLVL

SEQ ID NO: 1465 - DNA, 60 bp, Arabidopsis thaliana
  source 1..60: mol_type = genomic DNA
tgaatactaatgtatttatcaacaagtgctacagcctgtttttttcgaagctgttggtga

SEQ ID NO: 1466 - protein, 18 aa, Arabidopsis thaliana
ILMYLSTSATACFFRSCW

SEQ ID NO: 1467 - DNA, 93 bp, Arabidopsis thaliana
  source 1..93: mol_type = genomic DNA
tgattactttttgccaacatgaatactaatgtatttatcaacaagtgctacagcctgtttttttcgaagctgttggtgagttcccatccttag

SEQ ID NO: 1468 - protein, 29 aa, Arabidopsis thaliana
LLFANMNTNVFINKCYSLFFSKLLVSSHP

SEQ ID NO: 1469 - DNA, 72 bp, Arabidopsis thaliana
  source 1..72: mol_type = genomic DNA
taaatggctcgtctttttccaaacgatttcttcttcttcgtcgtcgccggtttagggtttccgttgctgtag

SEQ ID NO: 1470 - protein, 22 aa, Arabidopsis thaliana
MARLFPNDFFFFVVAGLGFPLL

SEQ ID NO: 1471 - DNA, 129 bp, Arabidopsis thaliana
  source 1..129: mol_type = genomic DNA
tgatttatgcttgtatttaaagttcctctccagtcgaagagtatatttcgctgtttcttggagttttcgatcttctccggagtaatttggcttcgacagagcggagattatcttcagattctgatttga

SEQ ID NO: 1472 - protein, 41 aa, Arabidopsis thaliana
FMLVFKVPLQSKSIFRCFLEFSIFSGVIWLRQSGDYLQILI

SEQ ID NO: 1473 - DNA, 168 bp, Arabidopsis thaliana
  source 1..168: mol_type = genomic DNA
tgaccaagaggagaaagtagtgattgttggcgccgggattggcggacttgccactgccgtttcacttcacaggcttggaatccggtcggtggtgttggagcaggcagagtcgcttcgtactggtggaacatcactgacgctattcaagaatgggtggcgcgttcttga

SEQ ID NO: 1474 - protein, 54 aa, Arabidopsis thaliana
PRGESSDCWRRDWRTCHCRFTSQAWNPVGGVGAGRVASYWWNITDAIQEWVARS

SEQ ID NO: 1475 - DNA, 198 bp, Arabidopsis thaliana
  source 1..198: mol_type = genomic DNA
tgatcggatttttttcagtcttctccgtctcgtcgttaccggcgtttgatcggatcatcgttttgtttcaggcgaaatatggtggtgatctccctgaagattttgaattcaaaatttcttcggttgcttcctcttgactttatcgcgatttcgattacgtgtagactttcttcttggctttgtcttcgaatcaattag

SEQ ID NO: 1476 - protein, 64 aa, Arabidopsis thaliana
SDFFQSSPSRRYRRLIGSSFCFRRNMVVISLKILNSKFLRLLPLDFIAISITCRLSSWLCLRIN

SEQ ID NO: 1477 - DNA, 51 bp, Arabidopsis thaliana
  source 1..51: mol_type = genomic DNA
taatccactagtaaacgtcacaaagcaattgggcatgcccatggacgttga

SEQ ID NO: 1478 - protein, 15 aa, Arabidopsis thaliana
STSKRHKAIGHAHGR

SEQ ID NO: 1479 - DNA, 51 bp, Arabidopsis thaliana
  source 1..51: mol_type = genomic DNA
taaacgtcacaaagcaattgggcatgcccatggacgttgatggagctctag

SEQ ID NO: 1480 - protein, 15 aa, Arabidopsis thaliana
TSQSNWACPWTLMEL

SEQ ID NO: 1481 - DNA, 54 bp, Arabidopsis thaliana
  source 1..54: mol_type = genomic DNA
tgaatcgccgtggctacctttctttttcttctgatttctctatctctcgcttga

SEQ ID NO: 1482 - protein, 16 aa, Arabidopsis thaliana
IAVATFLFLLISLSLA

SEQ ID NO: 1483 - DNA, 201 bp, Arabidopsis thaliana
  source 1..201: mol_type = genomic DNA
taaagagggtcatcatcatttcatggttacctcctcttcctctcttcttactctcaccatatctgctctctctctctctctgtttcaagcttttgctcccatttttcatttccttcgtattctcgctcgagcttagcggttgatgtaccaatgaccaaatcgatatttgaatcgccgtggctacctttctttttcttctga

SEQ ID NO: 1484 - protein, 65 aa, Arabidopsis thaliana
RGSSSFHGYLLFLSSYSHHICSLSLSVSSFCSHFSFPSYSRSSLAVDVPMTKSIFESPWLPFFFF

SEQ ID NO: 1485 - DNA, 60 bp, Arabidopsis thaliana
  source 1..60: mol_type = genomic DNA
taggatcagatggaacaaatgggtggctactcaaaacaacaaggtccatttttagtttga

SEQ ID NO: 1486 - protein, 18 aa, Arabidopsis thaliana
DQMEQMGGYSKQQGPFLV

SEQ ID NO: 1487 - DNA, 63 bp, Arabidopsis thaliana
  source 1..63: mol_type = genomic DNA
taagtccttaggatcagatggaacaaatgggtggctactcaaaacaacaaggtccatttttag

SEQ ID NO: 1488 - protein, 19 aa, Arabidopsis thaliana
VLRIRWNKWVATQNNKVHF

SEQ ID NO: 1489 - DNA, 54 bp, Arabidopsis thaliana
  source 1..54: mol_type = genomic DNA
tgaaacacgtgcatcctcagatctctatcaatccaggttcttcatcttttataa

SEQ ID NO: 1490 - protein, 16 aa, Arabidopsis thaliana
NTCILRSLSIQVLHLL

SEQ ID NO: 1491 - DNA, 147 bp, Arabidopsis thaliana
  source 1..147: mol_type = genomic DNA
tagcgtaaaaaaactaaatacttgtctttaaagaagaaaaatgctaggaaaaagaatagcttccttcaagaacttagcaaagaaaatgaagagcatcaacacgacgacgagaagcggaggagaaggcggctcggagtcaacttataa

SEQ ID NO: 1492 - protein, 47 aa, Arabidopsis thaliana
RKKTKYLSLKKKNARKKNSFLQELSKENEEHQHDDEKRRRRRLGVNL

SEQ ID NO: 1493 - DNA, 117 bp, Arabidopsis thaliana
  source 1..117: mol_type = genomic DNA
tgaagaacccatgttatcaacaagacgacgcatcttcttcgattcaagagatttcgatctcagcttctgaaattgcttcctgggatatgtcagagatactctcttacggaagtgtaa

SEQ ID NO: 1494 - protein, 37 aa, Arabidopsis thaliana
RTHVINKTTHLLRFKRFRSQLLKLLPGICQRYSLTEV

SEQ ID NO: 1495 - DNA, 60 bp, Arabidopsis thaliana
  source 1..60: mol_type = genomic DNA
tgagcttctcttcactactcctggagctcttccttgcctcagtggtgttatcctctttga

SEQ ID NO: 1496 - protein, 18 aa, Arabidopsis thaliana
ASLHYSWSSSLPQWCYPL

SEQ ID NO: 1497 - DNA, 156 bp, Arabidopsis thaliana
  source 1..156: mol_type = genomic DNA
tagaccagacgaaactcaaaaagtcagaagagaagagagacatcttcacatggccgaatgaaacacatatccaaacgccaaggacaaagaagaattcatcactttcttccatttcttctctgcaacttccgtaccaaaaaatacataaagccctaa

SEQ ID NO: 1498 - protein, 50 aa, Arabidopsis thaliana
TRRNSKSQKRRETSSHGRMKHISKRQGQRRIHHFLPFLLCNFRTKKYIKP

SEQ ID NO: 1499 - DNA, 120 bp, Arabidopsis thaliana
  source 1..120: mol_type = genomic DNA
tgacatttttgccgaattcgaagcattccttctatcttctccgtcttcttcgcagaatcgcgttatgcatctcaatttttagattgtaacttagggttactgattgttgtaatgctctga

SEQ ID NO: 1500 - protein, 38 aa, Arabidopsis thaliana
HFCRIRSIPSIFSVFFAESRYASQFLDCNLGLLIVVML

SEQ ID NO: 1501 - DNA, 60 bp, Arabidopsis thaliana
  source 1..60: mol_type = genomic DNA
tagctatcgaatttgagattcgatccgatgtttacttccaaatcttcgtttcgtctctga

SEQ ID NO: 1502 - protein, 18 aa, Arabidopsis thaliana
LSNLRFDPMFTSKSSFRL

SEQ ID NO: 1503 - DNA, 66 bp, Arabidopsis thaliana
  source 1..66: mol_type = genomic DNA
tgagattcgatccgatgtttacttccaaatcttcgtttcgtctctgataatataactccatcgtaa

SEQ ID NO: 1504 - protein, 20 aa, Arabidopsis thaliana
DSIRCLLPNLRFVSDNITPS

SEQ ID NO: 1505 - DNA, 78 bp, Arabidopsis thaliana
  source 1..78: mol_type = genomic DNA
taggaggaacaacacaaacatgggttcaagtacaacaacacgacgaatcacttaagctcaacacgacaacacctttga

SEQ ID NO: 1506 - protein, 24 aa, Arabidopsis thaliana
EEQHKHGFKYNNTTNHLSSTRQHL

SEQ ID NO: 1507 - DNA, 63 bp, Arabidopsis thaliana
  source 1..63: mol_type = genomic DNA
tgaaatcaaaagcatgaatgcttaaacagtttacgcattattgcgaaatgcaagccgagctga

SEQ ID NO: 1508 - protein, 19 aa, Arabidopsis thaliana
NQKHECLNSLRIIAKCKPS

SEQ ID NO: 1509 - DNA, 84 bp, Arabidopsis thaliana
  source 1..84: mol_type = genomic DNA
tgagagaacaacactagtcacaagggacaaagagagaggaagaagatgatatccatagctcaattggtctcaacccttccgtag

SEQ ID NO: 1510 - protein, 26 aa, Arabidopsis thaliana
ENNTSHKGQRERKKMISIAQLVSTLP

SEQ ID NO: 1511 - DNA, 75 bp, Arabidopsis thaliana
  source 1..75: mol_type = genomic DNA
tagtcacaagggacaaagagagaggaagaagatgatatccatagctcaattggtctcaacccttccgtagtttag

SEQ ID NO: 1512 - protein, 23 aa, Arabidopsis thaliana
SQGTKREEEDDIHSSIGLNPSVV

SEQ ID NO: 1513 - DNA, 69 bp, Arabidopsis thaliana
  source 1..69: mol_type = genomic DNA
tgattatttcgtgttggtatgtataaacaagccgatcgttgtttccttttttctcttgtgattgtgtga

SEQ ID NO: 1514 - protein, 21 aa, Arabidopsis thaliana
LFRVGMYKQADRCFLFSLVIV

SEQ ID NO: 1515 - DNA, 90 bp, Arabidopsis thaliana
  source 1..90: mol_type = genomic DNA
tgatggattgtttctttttttcggtttaatccggtttattcccggttttgctgctacatcggtgacttttcccacaatcttcgggtatga

SEQ ID NO: 1516 - protein, 28 aa, Arabidopsis thaliana
WIVSFFRFNPVYSRFCCYIGDFSHNLRV

SEQ ID NO: 1517 - DNA, 75 bp, Arabidopsis thaliana
  source 1..75: mol_type = genomic DNA
taaacaagccgatcgttgtttccttttttctcttgtgattgtgtgatgatggattgtttctttttttcggtttaa

SEQ ID NO: 1518 - protein, 23 aa, Arabidopsis thaliana
TSRSLFPFFSCDCVMMDCFFFSV

SEQ ID NO: 1519 - DNA, 63 bp, Arabidopsis thaliana
  source 1..63: mol_type = genomic DNA
tagtggcaatggtggtttctagttctatcatacctttctccaccacgaacctctggtagttga

SEQ ID NO: 1520 - protein, 19 aa, Arabidopsis thaliana
WQWWFLVLSYLSPPRTSGS

SEQ ID NO: 1521 - DNA, 57 bp, Arabidopsis thaliana
  source 1..57: mol_type = genomic DNA
tagctgttgataatgttgttcaggctgctacttcagcgatgcgggctgcaggtttag

SEQ ID NO: 1522 - protein, 17 aa, Arabidopsis thaliana
LLIMLFRLLLQRCGLQV

SEQ ID NO: 1523 - DNA, 114 bp, Arabidopsis thaliana
  source 1..114: mol_type = genomic DNA
tagccattggcgaatccaggagtattaaagttccattttgattttggcgacgatgatgaacagagtttagagaaatttgcattgaagaagagaagatttttggattttgtgtag

SEQ ID NO: 1524 - protein, 36 aa, Arabidopsis thaliana
PLANPGVLKFHFDFGDDDEQSLEKFALKKRRFLDFV

SEQ ID NO: 1525 - DNA, 216 bp, Arabidopsis thaliana
  source 1..216: mol_type = genomic DNA
tagggcttccgtgtttcgcagtgctctccttcaatccccagcttgacaatgcctcgctatgatgatcgctatgggaacactcgtctttacgttggccgattatcatcgagaactaggacccgagaccttgaacgtctttttagcagatacggaagagtgcgagatgtggatatgaagcgagattatgctttcgttgtaagtaaaatctccttttaa

SEQ ID NO: 1526 - protein, 70 aa, Arabidopsis thaliana
GFRVSQCSPSIPSLTMPRYDDRYGNTRLYVGRLSSRTRTRDLERLFSRYGRVRDVDMKRDYAFVVSKISF

SEQ ID NO: 1527 - DNA, 132 bp, Arabidopsis thaliana
  source 1..132: mol_type = genomic DNA
tgacaatgcctcgctatgatgatcgctatgggaacactcgtctttacgttggccgattatcatcgagaactaggacccgagaccttgaacgtctttttagcagatacggaagagtgcgagatgtggatatga

SEQ ID NO: 1528 - protein, 42 aa, Arabidopsis thaliana
QCLAMMIAMGTLVFTLADYHRELGPETLNVFLADTEECEMWI

SEQ ID NO: 1529 - DNA, 63 bp, Arabidopsis thaliana
  source 1..63: mol_type = genomic DNA
tagcagatacggaagagtgcgagatgtggatatgaagcgagattatgctttcgttgtaagtaa

SEQ ID NO: 1530 - protein, 19 aa, Arabidopsis thaliana
QIRKSARCGYEARLCFRCK

SEQ ID NO: 1531 - DNA, 54 bp, Arabidopsis thaliana
  source 1..54: mol_type = genomic DNA
tgatcgctatgggaacactcgtctttacgttggccgattatcatcgagaactag

SEQ ID NO: 1532 - protein, 16 aa, Arabidopsis thaliana
SLWEHSSLRWPIIIEN

SEQ ID NO: 1533 - DNA, 132 bp, Arabidopsis thaliana
  source 1..132: mol_type = genomic DNA
tgacaatgcctcgctatgatgatcgctatgggaacactcgtctttacgttggccgattatcatcgagaactaggacccgagaccttgaacgtctttttagcagatacggaaggtctctgggattttgcctaa

SEQ ID NO: 1534 - protein, 42 aa, Arabidopsis thaliana
QCLAMMIAMGTLVFTLADYHRELGPETLNVFLADTEGLWDFA

SEQ ID NO: 1535 - DNA, 162 bp, Arabidopsis thaliana
  source 1..162: mol_type = genomic DNA
taacagggtttcgaagagcataagataagaatgccttcggtgccctctaagcttcttcctctcctgtctttgattccttcgttgactccttatcattctggtttgagttctaatcgtttgaaacctcttgaaaagtgtgattggcgtggtaatcttagttaa

SEQ ID NO: 1536 - protein, 52 aa, Arabidopsis thaliana
QGFEEHKIRMPSVPSKLLPLLSLIPSLTPYHSGLSSNRLKPLEKCDWRGNLS

SEQ ID NO: 1537 - DNA, 162 bp, Arabidopsis thaliana; identical to SEQ ID NO: 1535
  source 1..162: mol_type = genomic DNA

SEQ ID NO: 1538 - protein, 52 aa, Arabidopsis thaliana; identical to SEQ ID NO: 1536

SEQ ID NO: 1539 - DNA, 63 bp, Arabidopsis thaliana
  source 1..63: mol_type = genomic DNA
taatcgattcgattttgtttgctaatgatgatgacgataccatctgcatcgtgctcatcttag

SEQ ID NO: 1540 - protein, 19 aa, Arabidopsis thaliana
SIRFCLLMMMTIPSASCSS

SEQ ID NO: 1541 - DNA, 63 bp, Arabidopsis thaliana; identical to SEQ ID NO: 1539
  source 1..63: mol_type = genomic DNA

SEQ ID NO: 1542 - protein, 19 aa, Arabidopsis thaliana
SIRFCLLMMMTIPSASCSS

SEQ ID NO: 1543 - DNA, 57 bp, Arabidopsis thaliana
  source 1..57: mol_type = genomic DNA
tgaagattgctgattttggatttgcaaggtattgtcatcagcaccccttgttactag

SEQ ID NO: 1544 - protein, 17 aa, Arabidopsis thaliana
RLLILDLQGIVISTPCY

SEQ ID NO: 1545 - DNA, 147 bp, Arabidopsis thaliana
  source 1..147: mol_type = genomic DNA
tgaaatttaattcttaaggttctttcgtttttgaaacagaatcttcttctatccacaaatgaaaatgatgcagatctgaagattgctgattttggatttgcaaggtattgtcatcagcaccccttgttactagatcaaagagtgtaa

SEQ ID NO: 1546 - protein, 47 aa, Arabidopsis thaliana
NLILKVLSFLKQNLLLSTNENDADLKIADFGFARYCHQHPLLLDQRV

SEQ ID NO: 1547 - DNA, 69 bp, Arabidopsis thaliana
  source 1..69: mol_type = genomic DNA
tgaccttcgattccaaactcgcaaacccagaaacgggttactcatagaaacagtgatagagagatatga

SEQ ID NO: 1548 - protein, 21 aa, Arabidopsis thaliana
PSIPNSQTQKRVTHRNSDREI

SEQ ID NO: 1549 - DNA, 147 bp, Arabidopsis thaliana
  source 1..147: mol_type = genomic DNA
taagaaatatcgaaacacttccacacaaaatccacgcgctctctcacgctcactcactcgcataacacttgttccttcttctctcaatttcaaaaaacgacgatctcttcgatgctttctcttccttcctccttcatttccttctga

SEQ ID NO: 1550 - protein, 47 aa, Arabidopsis thaliana
EISKHFHTKSTRSLTLTHSHNTCSFFSQFQKTTISSMLSLPSSFISF

SEQ ID NO: 1551 - DNA, 261 bp, Arabidopsis thaliana
  source 1..261: mol_type = genomic DNA
tgaatggctcaacaaaggagacaacgcgtggcagctcacggcagcgactctggttggtctacagagtatgccaggtcttgttatcctctatgcctccatcgtcaagaagaaatgggctgtgaattcagcttttatggctctttacgctttcgccgccgttcttctctgttgggttctcctctgttacaaaatggcttttggagaagagcttttgccgttttggggcaaaggtggtccagctttcgaccaaggataccttaa

SEQ ID NO: 1552 - protein, 85 aa, Arabidopsis thaliana
MAQQRRQRVAAHGSDSGWSTEYARSCYPLCLHRQEEMGCEFSFYGSLRFRRRSSLLGSPLLQNGFWRRAFAVLGQRWSSFRPRIP

SEQ ID NO: 1553 - DNA, 162 bp, Arabidopsis thaliana
  source 1..162: mol_type = genomic DNA
tgaattcagcttttatggctctttacgctttcgccgccgttcttctctgttgggttctcctctgttacaaaatggcttttggagaagagcttttgccgttttggggcaaaggtggtccagctttcgaccaaggataccttaagggacaagcaaaggtcttga

SEQ ID NO: 1554 - protein, 52 aa, Arabidopsis thaliana
IQLLWLFTLSPPFFSVGFSSVTKWLLEKSFCRFGAKVVQLSTKDTLRDKQRS

SEQ ID NO: 1555 - DNA, 57 bp, Arabidopsis thaliana
  source 1..57: mol_type = genomic DNA
taaaagcgtgacgtttccgcgtcttcgcgtatctcggaaactttaatccgtatctaa

SEQ ID NO: 1556 - protein, 17 aa, Arabidopsis thaliana
KRDVSASSRISETLIRI

SEQ ID NO: 1557 - DNA, 57 bp, Arabidopsis thaliana
  source 1..57: mol_type = genomic DNA
tgacgtttccgcgtcttcgcgtatctcggaaactttaatccgtatctaaagagctaa

SEQ ID NO: 1558 - protein, 17 aa, Arabidopsis thaliana
RFRVFAYLGNFNPYLKS

SEQ ID NO: 1559 - DNA, 60 bp, Arabidopsis thaliana
  source 1..60: mol_type = genomic DNA
tgatcacaaaagcataaaagcgtgacgtttccgcgtcttcgcgtatctcggaaactttaa

SEQ ID NO: 1560 - protein, 18 aa, Arabidopsis thaliana
SQKHKSVTFPRLRVSRKL

SEQ ID NO: 1561 - DNA, 57 bp, Arabidopsis thaliana
  source 1..57: mol_type = genomic DNA
tgaaatcgacggcgagatttgcgtctgattgtcgttataatgatcacaaaagcataa

SEQ ID NO: 1562 - protein, 17 aa, Arabidopsis thaliana
NRRRDLRLIVVIMITKA

SEQ ID NO: 1563 - DNA, 57 bp, Arabidopsis thaliana; identical to SEQ ID NO: 1561
  source 1..57: mol_type = genomic DNA

SEQ ID NO: 1564 - protein, 17 aa, Arabidopsis thaliana
NRRRDLRLIVVIMITKA

SEQ ID NO: 1565 - DNA, 60 bp, Arabidopsis thaliana
  source 1..60: mol_type = genomic DNA
taatcgaaacccgatctgtgtaaaaaaaatgatgaaatcgacggcgagatttgcgtctga

SEQ ID NO: 1566 - protein, 18 aa, Arabidopsis thaliana
SKPDLCKKNDEIDGEICV

SEQ ID NO: 1567 - DNA, 129 bp, Arabidopsis thaliana
  source 1..129: mol_type = genomic DNA
tagtattgcttcttgctccaccggatcttcttcttctgcgctcagccatctctttcaactatcaccgcctctattcggagagatctcgttctccaactaaggaattatgatcgccgacgccgtttctaa

SEQ ID NO: 1568 - protein, 41 aa, Arabidopsis thaliana
YCFLLHRIFFFCAQPSLSTITASIRRDLVLQLRNYDRRRRF

SEQ ID NO: 1569 - DNA, 84 bp, Arabidopsis thaliana
  source 1..84: mol_type = genomic DNA
tgaagcgaaaaaaagagagaattaaagtcattcattatttggggaatggagaagaagctcctttcctacagacgccatcattaa

SEQ ID NO: 1570 - protein, 26 aa, Arabidopsis thaliana
SEKKRELKSFIIWGMEKKLLSYRRHH

SEQ ID NO: 1571 - DNA, 66 bp, Arabidopsis thaliana
  source 1..66: mol_type = genomic DNA
taacaagcttatcatcaataccaaacaatgggttttagtttcttgactcgattctcaatcacgtga

SEQ ID NO: 1572 - protein, 20 aa, Arabidopsis thaliana
QAYHQYQTMGFSFLTRFSIT

SEQ ID NO: 1573 - DNA, 63 bp, Arabidopsis thaliana
  source 1..63: mol_type = genomic DNA
taagacttgttctcattttgtttgttcaaaatcccattaaaaaaaaacacaatgcaaccttaa

SEQ ID NO: 1574 - protein, 19 aa, Arabidopsis thaliana
DLFSFCLFKIPLKKNTMQP

SEQ ID NO: 1575 - DNA, 57 bp, Arabidopsis thaliana
  source 1..57: mol_type = genomic DNA
tgacgatcagattacagaatacagggaatctttcaggttattcgacaagaatggtga

SEQ ID NO: 1576 - protein, 17 aa, Arabidopsis thaliana
RSDYRIQGIFQVIRQEW

SEQ ID NO: 1577 - DNA, 78 bp, Arabidopsis thaliana
  source 1..78: mol_type = genomic DNA
taagaagacatatttatcaacttgatcaacttgagcaagttgcagcagatattttcctcggccaaggtaaagatctga

SEQ ID NO: 1578 - protein, 24 aa, Arabidopsis thaliana
EDIFINLINLSKLQQIFSSAKVKI

SEQ ID NO: 1579 - DNA, 57 bp, Arabidopsis thaliana
  source 1..57: mol_type = genomic DNA
tgaagttcgtggattttgaaggatttgattggtttccatggtattagatctctgtga

SEQ ID NO: 1580 - protein, 17 aa, Arabidopsis thaliana
SSWILKDLIGFHGIRSL

SEQ ID NO: 1581 - DNA, 78 bp, Arabidopsis thaliana; identical to SEQ ID NO: 1577
  source 1..78: mol_type = genomic DNA

SEQ ID NO: 1582 - protein, 24 aa, Arabidopsis thaliana
EDIFINLINLSKLQQIFSSAKVKI

SEQ ID NO: 1583 - DNA, 78 bp, Arabidopsis thaliana; identical to SEQ ID NO: 1577
  source 1..78: mol_type = genomic DNA

SEQ ID NO: 1584 - protein, 24 aa, Arabidopsis thaliana
EDIFINLINLSKLQQIFSSAKVKI

SEQ ID NO: 1585 - DNA, 78 bp, Arabidopsis thaliana
  source 1..78: mol_type = genomic DNA
tgaaatcccgctctgaattattacaatggcgccaaagagagcatcgccgatgcagtcttctctgtactctatcggtga

SEQ ID NO: 1586 - protein, 24 aa, Arabidopsis thaliana
NPALNYYNGAKESIADAVFSVLYR

SEQ ID NO: 1587 - DNA, 384 bp, Arabidopsis thaliana
  source 1..384: mol_type = genomic DNA
tgaattttctcagctctcactctctttttctctctctttacttctactgtatcaagaagctccgttttgcttagccatagtgcgtctagggtttggttggtgggaagaaggttccgatcatggcgtcggtgtcgtcgtcggatcaaggacctaagacagaagcaggatgtagcggcggaggaggaggagagagctcggagacagtggcggcgagtgatcagatgttgttgtatagaggttttaagaaggcgaagaaggagagaggttgtacagctaaggagcgtattagtaaaatgcctccgtgcactgctgggaaaaggagttccatataccggggagtcaccaggtttggttgtgaattgggagttgtgttatctgtattag

SEQ ID NO: 1588 - protein, 126 aa, Arabidopsis thaliana
IFSALTLFFSLFTSTVSRSSVLLSHSASRVWLVGRRFRSWRRCRRRIKDLRQKQDVAAEEEERARRQWRRVIRCCCIEVLRRRRRREVVQLRSVLVKCLRALLGKGVPYTGESPGLVVNWELCYLY

SEQ ID NO: 1589 - DNA, 69 bp, Arabidopsis thaliana
  source 1..69: mol_type = genomic DNA
tgaaacgtatctgaggaaggaaatattattatcagagctaaaagcttcgccggacgatccggcgactaa

SEQ ID NO: 1590 - protein, 21 aa, Arabidopsis thaliana
NVSEEGNIIIRAKSFAGRSGD

SEQ ID NO: 1591 - DNA, 180 bp, Arabidopsis thaliana
  source 1..180: mol_type = genomic DNA
tgaaaatttccattcgacgaatcggagttccaaaagctcgctgacgagttctcaatagtaacctctccggcgcttatcgtgaaaaaccctatgttccagacttctcttacgctttccttgcaaaatctgcctcaattttggattgaagacaagagcttgaggctttttctccaatcttaa

SEQ ID NO: 1592 - protein, 58 aa, Arabidopsis thaliana
KFPFDESEFQKLADEFSIVTSPALIVKNPMFQTSLTLSLQNLPQFWIEDKSLRLFLQS

SEQ ID NO: 1593 - DNA, 81 bp, Arabidopsis thaliana
  source 1..81: mol_type = genomic DNA
tgaaaaaccctatgttccagacttctcttacgctttccttgcaaaatctgcctcaattttggattgaagacaagagcttga

SEQ ID NO: 1594 - protein, 25 aa, Arabidopsis thaliana
KTLCSRLLLRFPCKICLNFGLKTRA

SEQ ID NO: 1595 - DNA, 72 bp, Arabidopsis thaliana
  source 1..72: mol_type = genomic DNA
taacgttgctttcttcccactccaaatggctcttgtgctctcagaacacacacagatataataaactcttaa

SEQ ID NO: 1596 - protein, 22 aa, Arabidopsis thaliana
RCFLPTPNGSCALRTHTDIINS

SEQ ID NO: 1597 - DNA, 81 bp, Arabidopsis thaliana
  source 1..81: mol_type = genomic DNA
taacagacgcactccaaagctaacgttgctttcttcccactccaaatggctcttgtgctctcagaacacacacagatataa

SEQ ID NO: 1598 - protein, 25 aa, Arabidopsis thaliana
QTHSKANVAFFPLQMALVLSEHTQI

SEQ ID NO: 1599 - DNA, 72 bp, Arabidopsis thaliana; identical to SEQ ID NO: 1595
  source 1..72: mol_type = genomic DNA

SEQ ID NO: 1600 - protein, 22 aa, Arabidopsis thaliana
RCFLPTPNGSCALRTHTDIINS

SEQ ID NO: 1601 - DNA, 81 bp, Arabidopsis thaliana; identical to SEQ ID NO: 1597
  source 1..81: mol_type = genomic DNA

SEQ ID NO: 1602 - protein, 25 aa, Arabidopsis thaliana
QTHSKANVAFFPLQMALVLSEHTQI

SEQ ID NO: 1603 - DNA, 138 bp, Arabidopsis thaliana
  source 1..138: mol_type = genomic DNA
tgacgcaaagataaagacaggcaatttcacttcagtgatgcaaatctgacagtagacttcactcttgtgtatattaaagtaaccgtcttgaagaggaaggaagataaccaagtgaatttcgtgatggtttcattgtaa

SEQ ID NO: 1604 - protein, 44 aa, Arabidopsis thaliana
RKDKDRQFHFSDANLTVDFTLVYIKVTVLKRKEDNQVNFVMVSL

SEQ ID NO: 1605 - DNA, 90 bp, Arabidopsis thaliana
  source 1..90: mol_type = genomic DNA
taattccacttcccatttgtctccacatttcgtttctttcctttgttttttcatctaggtttttggttttctgaattggatttacgttag

SEQ ID NO: 1606 - protein, 28 aa, Arabidopsis thaliana
FHFPFVSTFRFFPLFFHLGFWFSELDLR

SEQ ID NO: 1607 - DNA, 54 bp, Arabidopsis thaliana
  source 1..54: mol_type = genomic DNA
taggtttttggttttctgaattggatttacgttagtttatcttgtacttattaa

SEQ ID NO: 1608 - protein, 16 aa, Arabidopsis thaliana
VFGFLNWIYVSLSCTY

SEQ ID NO: 1609 - DNA, 90 bp, Arabidopsis thaliana; identical to SEQ ID NO: 1605
  source 1..90: mol_type = genomic DNA

SEQ ID NO: 1610 - protein, 28 aa, Arabidopsis thaliana
FHFPFVSTFRFFPLFFHLGFWFSELDLR

SEQ ID NO: 1611 - DNA, 117 bp, Arabidopsis thaliana
  source 1..117: mol_type = genomic DNA
tgaatgagaaattcgcctgcgattctgtctctgtcggtgatcgattgccggagcagaaccaggtcggattctagcttcgccatttggagtagtggtcgatggggccaatgcggctga

SEQ ID NO: 1612 - protein, 37 aa, Arabidopsis thaliana
MRNSPAILSLSVIDCRSRTRSDSSFAIWSSGRWGQCG

SEQ ID NO: 1613 - DNA, 114 bp, Arabidopsis thaliana
  source 1..114: mol_type = genomic DNA
tagaatttttctttctttttaaaaacatttcttttatttcttcttactttaaaacgtgtgagagatcgctttgctccgaaatttcaacccctggttgctttgtttgatccctag

SEQ ID NO: 1614 - protein, 36 aa, Arabidopsis thaliana
NFSFFLKTFLLFLLTLKRVRDRFAPKFQPLVALFDP

SEQ ID NO: 1615 - DNA, 93 bp, Arabidopsis thaliana
  source 1..93: mol_type = genomic DNA
tgaagaatcagagagaagagatatatagaggatgcctgtgatctccaaagcttcatctaccaccaccaattcatcgattccttcgtgttctag

SEQ ID NO: 1616 - protein, 29 aa, Arabidopsis thaliana
RIREKRYIEDACDLQSFIYHHQFIDSFVF

SEQ ID NO: 1617 - DNA, 75 bp, Arabidopsis thaliana
  source 1..75: mol_type = genomic DNA
tagaggatgcctgtgatctccaaagcttcatctaccaccaccaattcatcgattccttcgtgttctagggtttaa

SEQ ID NO: 1618 - protein, 23 aa, Arabidopsis thaliana
RMPVISKASSTTTNSSIPSCSRV

SEQ ID NO: 1619 - DNA, 123 bp, Arabidopsis thaliana
  source 1..123: mol_type = genomic DNA
tgaatcttggttttcaggttgtgttcccgagcttcggggaacgttacctctcgacccagcttttccagtcgattcgagaagagtgcgagcaaatgcagcccgagctttgattttcttctgtaa

SEQ ID NO: 1620 - protein, 39 aa, Arabidopsis thaliana
ILVFRLCSRASGNVTSRPSFSSRFEKSASKCSPSFDFLL

SEQ ID NO: 1621 - DNA, 162 bp, Arabidopsis thaliana
  source 1..162: mol_type = genomic DNA
tgagttgctgaatcttggttttcaggttgtgttcccgagcttcggggaacgttacctctcgacccagcttttccagtcgattcgagaagagtgcgagcaaatgcagcccgagctttgattttcttctgtaatttcgtgaccaacaaggaacctcttctttga

SEQ ID NO: 1622 - protein, 52 aa, Arabidopsis thaliana
VAESWFSGCVPELRGTLPLDPAFPVDSRRVRANAARALIFFCNFVTNKEPLL

SEQ ID NO: 1623 - DNA, 150 bp, Arabidopsis thaliana
  source 1..150: mol_type = genomic DNA
taacagattcatcatatgtatagtttgatatgtgagttgctgaatcttggttttcaggttgtgttcccgagcttcggggaacgttacctctcgacccagcttttccagtcgattcgagaagagtgcgagcaaatgcagcccgagctttga

SEQ ID NO: 1624 - protein, 48 aa, Arabidopsis thaliana
QIHHMYSLICELLNLGFQVVFPSFGERYLSTQLFQSIREECEQMQPEL

SEQ ID NO: 1625 - DNA, 141 bp, Arabidopsis thaliana
  source 1..141: mol_type = genomic DNA
taatttgcaaattcacatctttcttcttctttccgatgcaattttcatggccgaattcacaattgctgtgctcggccatggattctgattgggatcagtttctgtttttattttattttaaggtttggatgcttctgttga

SEQ ID NO: 1626 - protein, 45 aa, Arabidopsis thaliana
FANSHLSSSFRCNFHGRIHNCCARPWILIGISFCFYFILRFGCFC

SEQ ID NO: 1627 - DNA, 102 bp, Arabidopsis thaliana
  source 1..102: mol_type = genomic DNA
tgacctctcaatgaaaatctcgtccaggttcgctcatcttcccatctcctctacgaatgttcttctttggtttggatgcttctgttgactacgttttgctaa

SEQ ID NO: 1628 - protein, 32 aa, Arabidopsis thaliana
PLNENLVQVRSSSHLLYECSSLVWMLLLTTFC

SEQ ID NO: 1629 - DNA, 99 bp, Arabidopsis thaliana
  source 1..99: mol_type = genomic DNA
tgagctccggtgaaaaatggaggccaagaacaagaaagcagtagcctcccgtctctgctgcttatgcaacctgagacgtcccgtcctcaaaagacctaa

SEQ ID NO: 1630 - protein, 31 aa, Arabidopsis thaliana
APVKNGGQEQESSSLPSLLLMQPETSRPQKT

SEQ ID NO: 1631 - DNA, 153 bp, Arabidopsis thaliana
  source 1..153: mol_type = genomic DNA
tgatctctagctctctccaaagatgcatgcgttgcttactttcggaatctggggaagttccaattcaatcaattgaagaaaaaagctgagcctttattggttttggaagaattggtggtggtgggatctatcatctatggatcggaaacgtag

SEQ ID NO: 1632 - protein, 49 aa, Arabidopsis thaliana
SLALSKDACVAYFRNLGKFQFNQLKKKAEPLLVLEELVVVGSIIYGSET

SEQ ID NO: 1633 - DNA, 87 bp, Arabidopsis thaliana
  source 1..87: mol_type = genomic DNA
tgaagaaaaaagctgagcctttattggttttggaagaattggtggtggtgggatctatcatctatggatcggaaacgtagaggttga

SEQ ID NO: 1634 - protein, 27 aa, Arabidopsis thaliana
RKKLSLYWFWKNWWWWDLSSMDRKRRG

SEQ ID NO: 1635 - DNA, 108 bp, Arabidopsis thaliana
  source 1..108: mol_type = genomic DNA
taagttgccatttttgcctttaatgttgatctcaacatattgtaccgttggtattatgtactcttggatttggcagctccggaagatcctgacatgacatatagatag

SEQ ID NO: 1636 - protein, 34 aa, Arabidopsis thaliana
VAIFAFNVDLNILYRWYYVLLDLAAPEDPDMTYR

SEQ ID NO: 1637 - DNA, 66 bp, Arabidopsis thaliana
  source 1..66: mol_type = genomic DNA
tgatctcaacatattgtaccgttggtattatgtactcttggatttggcagctccggaagatcctga

SEQ ID NO: 1638 - protein, 20 aa, Arabidopsis thaliana
SQHIVPLVLCTLGFGSSGRS

SEQ ID NO: 1639 - DNA, 345 bp, Arabidopsis thaliana
  source 1..345: mol_type = genomic DNA
taattaagcaaatggcttcgtattactctggttttttgggttgtgaagagccacactttttggaatcgtgttctctttgccggaaacaccttggtcttaactccgatatcttcatgtacagaggagacaaggctttttgtagcaacgagtgtagagaagaacagattgaatctgatgaagctaaggagagaaagtggaaaaaatcttcaagatctctccggaaaaattcttctgaaactaaagaatccgccgccggaaacaccgtacggacaggaactctcgtcgtggcttagtagaagcttcagttacataatcaagcaaatagtctttttttcttctatataa

SEQ ID NO: 1640 - protein, 113 aa, Arabidopsis thaliana
LSKWLRITLVFWVVKSHTFWNRVLFAGNTLVLTPISSCTEETRLFVATSVEKNRLNLMKLRRESGKNLQDLSGKILLKLKNPPPETPYGQELSSWLSRSFSYIIKQIVFFSSI

SEQ ID NO: 1641 - DNA, 144 bp, Arabidopsis thaliana
  source 1..144: mol_type = genomic DNA
tgagataggctactattaaagaaggaatacgcttggcatattggaggagctcttcctcaccacgagcttgtagagtggaagctgttgtatcacagttccttacacggtcaaagcttcaacacatttctcggacacacatcgtga

SEQ ID NO: 1642 - protein, 46 aa, Arabidopsis thaliana
DRLLLKKEYAWHIGGALPHHELVEWKLLYHSSLHGQSFNTFLGHTS

SEQ ID NO: 1643 - DNA, 57 bp, Arabidopsis thaliana
  source 1..57: mol_type = genomic DNA
taaagaaggaatacgcttggcatattggaggagctcttcctcaccacgagcttgtag

SEQ ID NO: 1644 - protein, 17 aa, Arabidopsis thaliana
RRNTLGILEELFLTTSL

SEQ ID NO: 1645 - DNA, 129 bp, Arabidopsis thaliana
  source 1..129: mol_type = genomic DNA
tgaaaagactctgagccttccaagtatctaaattgcttaaaatcgggggacgaaaggtttggttgtgtttgtttgctattgaagatctctgtgtcttcgtttgattatgcccttttaaggaatttgtga

SEQ ID NO: 1646 - protein, 41 aa, Arabidopsis thaliana
KDSEPSKYLNCLKSGDERFGCVCLLLKISVSSFDYALLRNL

SEQ ID NO: 1647 - DNA, 132 bp, Arabidopsis thaliana
  source 1..132: mol_type = genomic DNA
tgaccggtttcgatggcggatggaaacgccagttcgcgttacgtgaaattgaggaaagagcaggctcctgtcgaagaagatatcacacccggtgaactcaatcagcccattgatgttcctcaggtacgttag

SEQ ID NO: 1648 - protein, 42 aa, Arabidopsis thaliana
PVSMADGNASSRYVKLRKEQAPVEEDITPGELNQPIDVPQVR

SEQ ID NO: 1649 - DNA, 54 bp, Arabidopsis thaliana
  source 1..54: mol_type = genomic DNA
taaagaaaattcgcaaggatgaagaatgatgaagaagcttctaggttatggtaa

SEQ ID NO: 1650 - protein, 16 aa, Arabidopsis thaliana
RKFARMKNDEEASRLW

SEQ ID NO: 1651 - DNA, 54 bp, Arabidopsis thaliana
  source 1..54: mol_type = genomic DNA
taggagaaaggatctttgatatggttactcaacacaggaaagatgataaaatga

SEQ ID NO: 1652 - protein, 16 aa, Arabidopsis thaliana
EKGSLIWLLNTGKMIK

SEQ ID NO: 1653 - DNA, 105 bp, Arabidopsis thaliana
  source 1..105: mol_type = genomic DNA
tgaattaagagtactctgcctctggaatttctgggttcttctcggattctctcaaaggtactctcttttcttagctcttgttcgaactcttcgattatcttatag

SEQ ID NO: 1654 - protein, 33 aa, Arabidopsis thaliana
IKSTLPLEFLGSSRILSKVLSFLSSCSNSSIIL

SEQ ID NO: 1655 - DNA, 372 bp, Arabidopsis thaliana
  source 1..372: mol_type = genomic DNA
tgatactatagtttatgcaaaaagattgcagaggtaaaaagaggaattaggaaaatgggtgatccatttggtggtagatttggaggatttagaggtagcttgtttggaggaagagatccttttgatgatcctttcttctctcgaccatttgaggatttgctcgaaccatccaacacctttagttcaggtgcttcctttagtaatgcacataagaacaatggtggaagaggtttaacaattgaagaattaccgtctgatgaagaagttgaagaaaggaaagatattggtattgatgatcaagaacatgctagttcagtgaataaaccatctgttgagcaccctgaagatgattctgatggtaactaccactag

SEQ ID NO: 1656 - protein, 122 aa, Arabidopsis thaliana
YYSLCKKIAEVKRGIRKMGDPFGGRFGGFRGSLFGGRDPFDDPFFSRPFEDLLEPSNTFSSGASFSNAHKNNGGRGLTIEELPSDEEVEERKDIGIDDQEHASSVNKPSVEHPEDDSDGNYH

SEQ ID NO: 1657 - DNA, 51 bp, Arabidopsis thaliana
  source 1..51: mol_type = genomic DNA
taatggcgtctacagcggctgaacaagacgagagaaaaattgtatcggtag

SEQ ID NO: 1658 - protein, 15 aa, Arabidopsis thaliana
WRLQRLNKTREKLYR

SEQ ID NO: 1659 - DNA, 81 bp, Arabidopsis thaliana
  source 1..81: mol_type = genomic DNA
taatctaaaccactattaatggagacaaatttgctaatgtcagacgattctttaggcaaatccaactgcaactttgaatga

SEQ ID NO: 1660 - protein, 25 aa, Arabidopsis thaliana
SKPLLMETNLLMSDDSLGKSNCNFE

SEQ ID NO: 1661 - DNA, 72 bp, Arabidopsis thaliana
  source 1..72: mol_type = genomic DNA
taaaccactattaatggagacaaatttgctaatgtcagacgattctttaggcaaatccaactgcaactttga

SEQ ID NO: 1662 - protein, 22 aa, Arabidopsis thaliana
TTINGDKFANVRRFFRQIQLQL

SEQ ID NO: 1663 - DNA, 102 bp, Arabidopsis thaliana
  source 1..102: mol_type = genomic DNA
tagcctcaaaaccaagtcctaaccattgttgatagaagagaaagcttttcttttcttgttgcttatggtgaaagaatgaaagagagagaggaggagaagtaa

SEQ ID NO: 1664 - protein, 32 aa, Arabidopsis thaliana
PQNQVLTIVDRRESFSFLVAYGERMKEREEEK

SEQ ID NO: 1665 - DNA, 54 bp, Arabidopsis thaliana
  source 1..54: mol_type = genomic DNA
tgaaagaatgaaagagagagaggaggagaagtaagaagcagagaaagtgtttag

SEQ ID NO: 1666 - protein, 16 aa, Arabidopsis thaliana
KNERERGGEVRSRESV

SEQ ID NO: 1667 - DNA, 123 bp, Arabidopsis thaliana
  source 1..123: mol_type = genomic DNA
taggaactaaatctctttctctggttcatcaatggcggatcaaacgaagaagagatacgttacaagcgaggatttgaaaaaacacaacaaacctggagatttatggatttcgattcaaggtaa

SEQ ID NO: 1668 - protein, 39 aa, Arabidopsis thaliana
ELNLFLWFINGGSNEEEIRYKRGFEKTQQTWRFMDFDSR

SEQ ID NO: 1669 - DNA, 180 bp, Arabidopsis thaliana
  source 1..180: mol_type = genomic DNA
tgaaccctaaaaactctattattggattggatcatcatcgttaaagctccacgccttgtcccaatttcctctttggttctttccttctgggcttgttattgttgtttctcgaaaaagaagaagaagcgatggtattgggattttagggattattgcggtttgttgtatatatatatatag

SEQ ID NO: 1670 - protein, 58 aa, Arabidopsis thaliana
TLKTLLLDWIIIVKAPRLVPISSLVLSFWACYCCFSKKKKKRWYWDFRDYCGLLYIYI

SEQ ID NO: 1671 - DNA, 105 bp, Arabidopsis thaliana
  source 1..105: mol_type = genomic DNA
taaagctccacgccttgtcccaatttcctctttggttctttccttctgggcttgttattgttgtttctcgaaaaagaagaagaagcgatggtattgggattttag

SEQ ID NO: 1672 - protein, 33 aa, Arabidopsis thaliana
SSTPCPNFLFGSFLLGLLLLFLEKEEEAMVLGF

SEQ ID NO: 1673 - DNA, 90 bp, Arabidopsis thaliana
  source 1..90: mol_type = genomic DNA
tagaagaaagtcatgatttgtatttaccctttgttcttggtgttcatctattttcgttttccacgagatcctatatacatagttctatag

SEQ ID NO: 1674 - protein, 28 aa, Arabidopsis thaliana
KKVMICIYPLFLVFIYFRFPRDPIYIVL

SEQ ID NO: 1675 - DNA, 60 bp, Arabidopsis thaliana
  source 1..60: mol_type = genomic DNA
tagttctatagaatatctaataaggaaaatctaatgttcatgtttcatttttctgtttaa

SEQ ID NO: 1676 - protein, 18 aa, Arabidopsis thaliana
FYRISNKENLMFMFHFSV

SEQ ID NO: 1677 - DNA, 108 bp, Arabidopsis thaliana
  source 1..108: mol_type = genomic DNA
tgatcaaaagcaaatcacttcttcttcttcttcttctcgatttcttactgttttcttatccaacgaaatctggaattaaaaatggaatctttatcgaatccaagctga

SEQ ID NO: 1678 - protein, 34 aa, Arabidopsis thaliana
SKANHFFFFFFSISYCFLIQRNLELKMESLSNPS

SEQ ID NO: 1679 - DNA, 72 bp, Arabidopsis thaliana
  source 1..72: mol_type = genomic DNA
tgattcgatattgctctagaggtacgcattcacacgatcgtagcctgcgatcggttctctcgtcaaatatga

SEQ ID NO: 1680 - protein, 22 aa, Arabidopsis thaliana
FDIALEVRIHTIVACDRFSRQI

SEQ ID NO: 1681 - DNA, 54 bp, Arabidopsis thaliana
  source 1..54: mol_type = genomic DNA
taaaccttgaataaagacatgttctttaacatgggtttttccggtttaaagtag

SEQ ID NO: 1682 - protein, 16 aa, Arabidopsis thaliana
TLNKDMFFNMGFSGLK

SEQ ID NO: 1683 - DNA, 51 bp, Arabidopsis thaliana
  source 1..51: mol_type = genomic DNA
taacatgggtttttccggtttaaagtagttgtatctttgtttcccctttaa

SEQ ID NO: 1684 - protein, 15 aa, Arabidopsis thaliana
HGFFRFKVVVSLFPL

SEQ ID NO: 1685 - DNA, 54 bp, Arabidopsis thaliana; identical to SEQ ID NO: 1681
  source 1..54: mol_type = genomic DNA

SEQ ID NO: 1686 - protein, 16 aa, Arabidopsis thaliana
TLNKDMFFNMGFSGLK

SEQ ID NO: 1687 - DNA, 51 bp, Arabidopsis thaliana; identical to SEQ ID NO: 1683
  source 1..51: mol_type = genomic DNA

SEQ ID NO: 1688 - protein, 15 aa, Arabidopsis thaliana
HGFFRFKVVVSLFPL

SEQ ID NO: 1689 - DNA, 333 bp, Arabidopsis thaliana
  source 1..333: mol_type = genomic DNA
taaagagtcaattatacccctataattctcacgcggtttaagaaaatgcaacaacaagtaaggggtgtatctgtcttctcacacataagatttttttttttgcttattaaaactcttacgtattgttgtttcctattctcaaatttgtattttccagattttccagaaaaatctcacagcggtaagaaaaaaagaaaaagaagagtcagtggtcttgttgtttcgttcttccttgttcgctcgacctggccgatgtctaaccaggaccaggagacgcgcacacaattcgcagaatgtaacgttgttgctactcttcttctctcgtttctgtga

SEQ ID NO: 1690 - protein, 109 aa, Arabidopsis thaliana
RVNYTPIILTRFKKMQQQVRGVSVFSHIRFFFLLIKTLTYCCFLFSNLYFPDFPEKSHSGKKKRKRRVSGLVVSFFLVRSTWPMSNQDQETRTQFAECNVVATLLLSFL

SEQ ID NO: 1691 - DNA, 249 bp, Arabidopsis thaliana
  source 1..249: mol_type = genomic DNA
tgattttcagatttgtttaactcggtcgttgcgttgacttcaaatttcttaaaagagagagagagagagagaggagatagttcagaaaatctgtcagacttgggatctttctcggcaatgcgacgcttgttcgccgcgaaatccctctcccgagaggatacaacctttttgtcattctcttcttcttcggtgacgcgtttcctcaaggctcttcttcctctccgttcagatccaagagatgtccgctaa

SEQ ID NO: 1692 - protein, 81 aa, Arabidopsis thaliana
FSDLFNSVVALTSNFLKERERERGDSSENLSDLGSFSAMRRLFAAKSLSREDTTFLSFSSSSVTRFLKALLPLRSDPRDVR

SEQ ID NO: 1693 - DNA, 162 bp, Arabidopsis thaliana
  source 1..162: mol_type = genomic DNA
tgaagagcgaaagaagagagagagagagagagagaccgaccaaagaagaagctcctctcaatcactgtcgaagcatctcttcttcttcttcttctttttttcttctctctcagagcttttctaatcggcttctccggtaaatctctgtcgatccaccgatga

SEQ ID NO: 1694 - protein, 52 aa, Arabidopsis thaliana
RAKEERERERDRPKKKLLSITVEASLLLLLLFFFSLRAFLIGFSGKSLSIHR

SEQ ID NO: 1695 - DNA, 111 bp, Arabidopsis thaliana
  source 1..111: mol_type = genomic DNA
taaaaggcattcgctttcgagtgttggttgtcgatttcgatgccccaatctgggacctgggtactgttcccaagctccacctggattcttattgatgtgaagctcgtataa

SEQ ID NO: 1696 - protein, 35 aa, Arabidopsis thaliana
KAFAFECWLSISMPQSGTWVLFPSSTWILIDVKLV

SEQ ID NO: 1697 - DNA, 111 bp, Arabidopsis thaliana; identical to SEQ ID NO: 1695
  source 1..111: mol_type = genomic DNA

SEQ ID NO: 1698 - protein, 35 aa, Arabidopsis thaliana; identical to SEQ ID NO: 1696

SEQ ID NO: 1699 - DNA, 396 bp, Arabidopsis thaliana
  source 1..396: mol_type = genomic DNA
taaccatgtccgtctctctgttcactgccttcaccgttctctcactctgtttacacacttcaacatctgagtttcagctgtccaccatatcagctgcaccttcgttcttgcctgaagctccatcgagtttctcagcttctaccccggccatgtctccagatacctctcccctgttccctactccaggttcaagcgaaatgtctccttccccgtcggaatcgtctatcatgccgacaatcccctcaagccttagtccaccaaacccagatgctgtcactcctgatcctctgctcgaagtttctccagttggatctcctcttccagcttcttcctctgtttgtttggtctcatcacaactctcatctctgcttcttgtcctactcatgttgctactag

SEQ ID NO: 1700 - protein, 130 aa, Arabidopsis thaliana
PCPSLCSLPSPFSHSVYTLQHLSFSCPPYQLHLRSCLKLHRVSQLLPRPCLQIPLPCSLLQVQAKCLLPRRNRLSCRQSPQALVHQTQMLSLLILCSKFLQLDLLFQLLPLFVWSHHNSHLCFLSYSCCY

SEQ ID NO: 1701 - DNA, 51 bp, Arabidopsis thaliana
  source 1..51: mol_type = genomic DNA
taggctacaggagcgagagcaatgaaagcgagaggaagaatctatcaataa

SEQ ID NO: 1702 - protein, 15 aa, Arabidopsis thaliana
ATGARAMKARGRIYQ

SEQ ID NO: 1703 - DNA, 156 bp, Arabidopsis thaliana
  source 1..156: mol_type = genomic DNA
taatctcaactgctaatcaatggcgccacctccaggactttactccggtaccagcactcttgctctggttgctcgtgcttcggctttcgggttgggtctcatctacggcaacatcaagctcaaggctttaaagataaagaagaattcgcagattaa

SEQ ID NO: 1704 - protein, 50 aa, Arabidopsis thaliana
SQLLINGATSRTLLRYQHSCSGCSCFGFRVGSHLRQHQAQGFKDKEEFAD

SEQ ID NO: 1705 - DNA, 66 bp, Arabidopsis thaliana
  source 1..66: mol_type = genomic DNA
taaaattttgaattcttcatcatgacgacgacgacgacgattcagtctcctctctctacacgttga

SEQ ID NO: 1706 - protein, 20 aa, Arabidopsis thaliana
NFEFFIMTTTTTIQSPLSTR

SEQ ID NO: 1707 - DNA, 243 bp, Arabidopsis thaliana
  source 1..243: mol_type = genomic DNA
tgacgacgacgacgacgattcagtctcctctctctacacgttgaatttcaatcggcttcacgaaccttcaacctcgtgcggatcgaaattcgatcagtttgtagtaaccgacaagttccgaagatttttcatctgctggatttcgtcgatcagattgaaaccgagcttttcaatcaggtgacttggatatttctctacgttatgctcgatctgaagaattgggattcaaatctagtctcatag

SEQ ID NO: 1708 - protein, 79 aa, Arabidopsis thaliana
RRRRRFSLLSLHVEFQSASRTFNLVRIEIRSVCSNRQVPKIFHLLDFVDQIETELFNQVTWIFLYVMLDLKNWDSNLVS

SEQ ID NO: 1709 - DNA, 129 bp, Arabidopsis thaliana
  source 1..129: mol_type = genomic DNA
taggtttcttgttggatcttgatccctctggaaaaggaggggagaatagcagttcatgatgggattttgtatctgcccgttggagtcacctgcgagattactatggagtacaagcttcttccgccataa

SEQ ID NO: 1710 - protein, 41 aa, Arabidopsis thaliana
VSCWILIPLEKEGRIAVHDGILYLPVGVTCEITMEYKLLPP

SEQ ID NO: 1711 - DNA, 99 bp, Arabidopsis thaliana
  source 1..99: mol_type = genomic DNA
tagcagttcatgatgggattttgtatctgcccgttggagtcacctgcgagattactatggagtacaagcttcttccgccataagatcatgatcttctaa

SEQ ID NO: 1712 - protein, 31 aa, Arabidopsis thaliana
QFMMGFCICPLESPARLLWSTSFFRHKIMIF

SEQ ID NO: 1713 - DNA, 81 bp, Arabidopsis thaliana
  source 1..81: mol_type = genomic DNA
tgatgggattttgtatctgcccgttggagtcacctgcgagattactatggagtacaagcttcttccgccataagatcatga

SEQ ID NO: 1714 - protein, 25 aa, Arabidopsis thaliana
WDFVSARWSHLRDYYGVQASSAIRS

SEQ ID NO: 1715 - DNA, 129 bp, Arabidopsis thaliana; identical to SEQ ID NO: 1709
  source 1..129: mol_type = genomic DNA

SEQ ID NO: 1716 - protein, 41 aa, Arabidopsis thaliana; identical to SEQ ID NO: 1710

SEQ ID NO: 1717 - DNA, 81 bp, Arabidopsis thaliana; identical to SEQ ID NO: 1713
  source 1..81: mol_type = genomic DNA

SEQ ID NO: 1718 - protein, 25 aa, Arabidopsis thaliana
WDFVSARWSHLRDYYGVQASSAIRS

SEQ ID NO: 1719 - DNA, 75 bp, Arabidopsis thaliana
  source 1..75: mol_type = genomic DNA
taactaaaacgcacacaaacaagaaaaaaagctatgaaaacaggaaaaaaaataggaaatatcagtcttgtctaa

SEQ ID NO: 1720 - protein, 23 aa, Arabidopsis thaliana
LKRTQTRKKAMKTGKKIGNISLV

SEQ ID NO: 1721 - DNA, 54 bp, Arabidopsis thaliana
  source 1..54: mol_type = genomic DNA
taattatttgctttgtttcgccgttttggtaacacacagacacagttccggtaa

SEQ ID NO: 1722 - protein, 16 aa, Arabidopsis thaliana
LFALFRRFGNTQTQFR

SEQ ID NO: 1723 - DNA, 117 bp, Arabidopsis thaliana
  source 1..117: mol_type = genomic DNA
tgatttgattctattgcattgagattgatatcttgttgcaggggaactctggttccatgtgttaggtattttcctttcgtcgacctgattcatcttgtgcatgtcgattctgaataa

SEQ ID NO: 1724 - protein, 37 aa, Arabidopsis thaliana
FDSIALRLISCCRGTLVPCVRYFPFVDLIHLVHVDSE

SEQ ID NO: 1725 - DNA, 51 bp, Arabidopsis thaliana
  source 1..51: mol_type = genomic DNA
tgaacgaagaaggctgcgtcccgcacaactctggttagtctgtgtacctaa

SEQ ID NO: 1726 - protein, 15 aa, Arabidopsis thaliana
TKKAASRTTLVSLCT

SEQ ID NO: 1727 - DNA, 90 bp, Arabidopsis thaliana
  source 1..90: mol_type = genomic DNA
taatcgtttctctcaaatttagggttttctcttttctcgaaagtcttgcggttttctgaatcatctctatctggtgagtctcttttttga

SEQ ID NO: 1728 - protein, 28 aa, Arabidopsis thaliana
SFLSNLGFSLFSKVLRFSESSLSGESLF

SEQ ID NO: 1729 - DNA, 105 bp, Arabidopsis thaliana
  source 1..105: mol_type = genomic DNA
tgaagacgttcgtccaaacggtggaatcaagaaattcaaatcttctgtctactcaaactgctccaagaggccatcctgagtaccagcgtgcaccgatcttcataa

SEQ ID NO: 1730 - protein, 33 aa, Arabidopsis thaliana
RRSSKRWNQEIQIFCLLKLLQEAILSTSVHRSS

SEQ ID NO: 1731 - DNA, 216 bp, Arabidopsis thaliana
  source 1..216: mol_type = genomic DNA
taattcgcgatcttgatctatcgatcttcatttatatataaaagcgtgaatgagattatgatggagtcgaaaggtggtaaaaagaagtccagcagtagtagttccttattttacgaagctcccctcggttacagcattgaagacgttcgtccaaacggtggaatcaagaaattcaaatcttctgtctactcaaactgctccaagaggccatcctga

SEQ ID NO: 1732 - protein, 70 aa, Arabidopsis thaliana
FAILIYRSSFIYKSVNEIMMESKGGKKKSSSSSSLFYEAPLGYSIEDVRPNGGIKKFKSSVYSNCSKRPS

SEQ ID NO: 1733 - DNA, 78 bp, Arabidopsis thaliana
  source 1..78: mol_type = genomic DNA
tagggttttctcttttctcgaaagtcttgcggttttctgaatcatctctatctggtgagtctcttttttgaattgtag

SEQ ID NO: 1734 - protein, 24 aa, Arabidopsis thaliana
GFLFSRKSCGFLNHLYLVSLFFEL

SEQ ID NO: 1735 - DNA, 189 bp, Arabidopsis thaliana
  source 1..189: mol_type = genomic DNA
tgatggagtcgaaaggtggtaaaaagaagtccagcagtagtagttccttattttacgaagctcccctcggttacagcattgaagacgttcgtccaaacggtggaatcaagaaattcaaatcttctgtctactcaaactgctccaagaggccatcctgagtaccagcgtgcaccgatcttcataatatag

SEQ ID NO: 1736 - protein, 61 aa, Arabidopsis thaliana
WSRKVVKRSPAVVVPYFTKLPSVTALKTFVQTVESRNSNLLSTQTAPRGHPEYQRAPIFII

SEQ ID NO: 1737 - DNA, 216 bp, Arabidopsis thaliana; identical to SEQ ID NO: 1731
  source 1..216: mol_type = genomic DNA

SEQ ID NO: 1738 - protein, 70 aa, Arabidopsis thaliana; identical to SEQ ID NO: 1732

SEQ ID NO: 1739 - DNA, 189 bp, Arabidopsis thaliana; identical to SEQ ID NO: 1735
  source 1..189: mol_type = genomic DNA

SEQ ID NO: 1740 - protein, 61 aa, Arabidopsis thaliana; identical to SEQ ID NO: 1736

SEQ ID NO: 1741 - DNA, 105 bp, Arabidopsis thaliana; identical to SEQ ID NO: 1729
  source 1..105: mol_type = genomic DNA

SEQ ID NO: 1742 - protein, 33 aa, Arabidopsis thaliana; identical to SEQ ID NO: 1730

SEQ ID NO: 1743 - DNA, 216 bp, Arabidopsis thaliana; identical to SEQ ID NO: 1731
  source 1..216: mol_type = genomic DNA

SEQ ID NO: 1744 - protein, 70 aa, Arabidopsis thaliana; identical to SEQ ID NO: 1732

SEQ ID NO: 1745 - DNA, 189 bp, Arabidopsis thaliana; identical to SEQ ID NO: 1735
  source 1..189: mol_type = genomic DNA

SEQ ID NO: 1746 - protein, 61 aa, Arabidopsis thaliana; identical to SEQ ID NO: 1736

SEQ ID NO: 1747 - DNA, 105 bp, Arabidopsis thaliana; identical to SEQ ID NO: 1729
  source 1..105: mol_type = genomic DNA

SEQ ID NO: 1748 - protein, 33 aa, Arabidopsis thaliana; identical to SEQ ID NO: 1730

SEQ ID NO: 1749 - DNA, 63 bp, Arabidopsis thaliana
  source 1..63: mol_type = genomic DNA
tgacgatttgggtttaaaaatcactgcttgtgtatgtatgtatactggttgttgacgaattag

SEQ ID NO: 1750 - protein, 19 aa, Arabidopsis thaliana
RFGFKNHCLCMYVYWLLTN

SEQ ID NO: 1751 - DNA, 171 bp, Arabidopsis thaliana
  source 1..171: mol_type = genomic DNA
taaacaagactcgaaaagggtcagacccagaagtctcatcttttaccttttttcttggtcagctttgaaaggcttcatcttttttttattccgttttttttttcttcattcaattttgacgatttgggtttaaaaatcactgcttgtgtatgtatgtatactggttgttga

SEQ ID NO: 1752 - protein, 55 aa, Arabidopsis thaliana
TRLEKGQTQKSHLLPFFLVSFERLHLFFIPFFFSSFNFDDLGLKITACVCMYTGC

SEQ ID NO: 1753 - DNA, 60 bp, Arabidopsis thaliana
  source 1..60: mol_type = genomic DNA
tgacgaattagattttgctcaaaagggttcttgcacaaagtagctggaactaaattttga

SEQ ID NO: 1754 - protein, 18 aa, Arabidopsis thaliana
RIRFCSKGFLHKVAGTKF

SEQ ID NO: 1755 - DNA, 81 bp, Arabidopsis thaliana
  source 1..81: mol_type = genomic DNA
taaaaatcactgcttgtgtatgtatgtatactggttgttgacgaattagattttgctcaaaagggttcttgcacaaagtag

SEQ ID NO: 1756 - protein, 25 aa, Arabidopsis thaliana
KSLLVYVCILVVDELDFAQKGSCTK

SEQ ID NO: 1757 - DNA, 81 bp, Arabidopsis thaliana
  source 1..81: mol_type = genomic DNA
taaataatcttcttcaacagtttttttctcttaaatttttgtttcgaaaaccgctcactacttcttaatcgaaatgactga

SEQ ID NO: 1758 - protein, 25 aa, Arabidopsis thaliana
IIFFNSFFLLNFCFENRSLLLNRND

SEQ ID NO: 1759 - DNA, 54 bp, Arabidopsis thaliana
  source 1..54: mol_type = genomic DNA
taaatttttgtttcgaaaaccgctcactacttcttaatcgaaatgactgactga

SEQ ID NO: 1760 - protein, 16 aa, Arabidopsis thaliana
IFVSKTAHYFLIEMTD

SEQ ID NO: 1761 - DNA, 126 bp, Arabidopsis thaliana
  source 1..126: mol_type = genomic DNA
taaccccgagatacttcctcgcgccaccgtcatccatttcatcttctgcatccctctcctccaactccgccgtctcgcttcctctctaggatcatacctatgcttcgattccggcgccggagttga

SEQ ID NO: 1762 - protein, 40 aa, Arabidopsis thaliana
PRDTSSRHRHPFHLLHPSPPTPPSRFLSRIIPMLRFRRRS

SEQ ID NO: 1763 - DNA, 66 bp, Arabidopsis thaliana
  source 1..66: mol_type = genomic DNA
taaaaagatcagtttctgggaagtttaaagtcatcgatttcatcaattttctgcggaatttcataa

SEQ ID NO: 1764 - protein, 20 aa, Arabidopsis thaliana
KDQFLGSLKSSISSIFCGIS

SEQ ID NO: 1765 - DNA, 192 bp, Arabidopsis thaliana
  source 1..192: mol_type = genomic DNA
tgacgagtcccagtaacgcacttcatagtagtactccacacttctggccagttcgccggagcaggctttgccgttcccggaatttccctcgttttcactccggcgaacgcagcagcggcggaggaggaaaattgtgctcgctctctcttctctccggaagtggcgccggtaaattcagtgtcagagctctag

SEQ ID NO: 1766 - protein, 62 aa, Arabidopsis thaliana
RVPVTHFIVVLHTSGQFAGAGFAVPGISLVFTPANAAAAEEENCARSLFSPEVAPVNSVSEL

SEQ ID NO: 1767 - DNA, 72 bp, Arabidopsis thaliana
  source 1..72: mol_type = genomic DNA
tgaaaaagatgtcagattgactcgatttcgttgctacaaatggagatgggtctttcttatttatcttactag

SEQ ID NO: 1768 - protein, 22 aa, Arabidopsis thaliana
KRCQIDSISLLQMEMGLSYLSY

SEQ ID NO: 1769 - DNA, 81 bp, Arabidopsis thaliana
  source 1..81: mol_type = genomic DNA
tagagattgagttctggatttttcacgcgccttggatttgatctaatgtactctcttttttcatgtcttaatctggtttag

SEQ ID NO: 1770 - protein, 25 aa, Arabidopsis thaliana
RLSSGFFTRLGFDLMYSLFSCLNLV

SEQ ID NO: 1771 - DNA, 51 bp, Arabidopsis thaliana
  source 1..51: mol_type = genomic DNA
taaattttcagggagtttctttcttcttcttttgaagaccctttgtcatga

SEQ ID NO: 1772 - protein, 15 aa, Arabidopsis thaliana
IFREFLSSSFEDPLS

SEQ ID NO: 1773 - DNA, 81 bp, Arabidopsis thaliana; identical to SEQ ID NO: 1769
  source 1..81: mol_type = genomic DNA

SEQ ID NO: 1774 - protein, 25 aa, Arabidopsis thaliana
RLSSGFFTRLGFDLMYSLFSCLNLV

SEQ ID NO: 1775 - DNA, 93 bp, Arabidopsis thaliana
  source 1..93: mol_type = genomic DNA
tagtttctttcaggaaatgcagaaactggtttctctacaaacttcttcttcttcttctccttcgtttttcttctcctaaatctgccgatttga

SEQ ID NO: 1776 - protein, 29 aa, Arabidopsis thaliana
FLSGNAETGFSTNFFFFFSFVFLLLNLPI

SEQ ID NO: 1777 - DNA, 54 bp, Arabidopsis thaliana
  source 1..54: mol_type = genomic DNA
tagaatgtaataatgagagagtctatacagatactgttcttatctactacatga

SEQ ID NO: 1778 - protein, 16 aa, Arabidopsis thaliana
NVIMRESIQILFLSTT

SEQ ID NO: 1779 - DNA, 54 bp, Arabidopsis thaliana; identical to SEQ ID NO: 1777
  source 1..54: mol_type = genomic DNA

SEQ ID NO: 1780 - protein, 16 aa, Arabidopsis thaliana
NVIMRESIQILFLSTT

SEQ ID NO: 1781 - DNA, 81 bp, Arabidopsis thaliana
  source 1..81: mol_type = genomic DNA
tgaaattctacacttcttgggtcgataccgccaatcgaaatatcaatttcgtcactgaattgttcacttctggcaccttaa

SEQ ID NO: 1782 - protein, 25 aa, Arabidopsis thaliana
NSTLLGSIPPIEISISSLNCSLLAP

SEQ ID NO: 1783 - DNA, 54 bp, Arabidopsis thaliana; identical to SEQ ID NO: 1777
  source 1..54: mol_type = genomic DNA

SEQ ID NO: 1784 - protein, 16 aa, Arabidopsis thaliana
NVIMRESIQILFLSTT

SEQ ID NO: 1785 - DNA, 492 bp, Arabidopsis thaliana
  source 1..492: mol_type = genomic DNA
taatatgattatgcagaaattgctataagaagaaacctaaactctctcccatttattaaaagagagacgtttgtattggtagatctattcttatttttccttttgggatttttttatttggttcgtaattgtgagattgaaagagagatgaacaatctgagttatcttgaaccagattactctgagtttgttgaagttgatcctactggaagatatggaagatacaatgaagttcttggtaaaggagcttcaaagactgtttatagagcatttgatgaatatgaaggcatagaagtagcatggaaccaagttaagctatatgatttcctacaaagccctgaggatcttgagaggctttactgtgagattcatcttctcaagactctaaaacataagaacatcatgaaattctacacttcttgggtcgataccgccaatcgaaatatcaatttcgtcactgaattgttcacttctggcaccttaagacagtaa

SEQ ID NO: 1786 - protein, 162 aa, Arabidopsis thaliana
YDYAEIAIRRNLNSLPFIKRETFVLVDLFLFFLLGFFYLVRNCEIEREMNNLSYLEPDYSEFVEVDPTGRYGRYNEVLGKGASKTVYRAFDEYEGIEVAWNQVKLYDFLQSPEDLERLYCEIHLLKTLKHKNIMKFYTSWVDTANRNINFVTELFTSGTLRQ

SEQ ID NO: 1787 - DNA, 69 bp, Arabidopsis thaliana
  source 1..69: mol_type = genomic DNA
taagaacatcatgaaattctacacttcttgggtcgataccgccaatcgaaatatcaatttcgtcactga

SEQ ID NO: 1788 - protein, 21 aa, Arabidopsis thaliana
EHHEILHFLGRYRQSKYQFRH

SEQ ID NO: 1789 - DNA, 57 bp, Arabidopsis thaliana
  source 1..57: mol_type = genomic DNA
taagatcgcttggaagcgtttcagggagttgttggaatggagggtccggaaagatga

SEQ ID NO: 1790 - protein, 17 aa, Arabidopsis thaliana
DRLEAFQGVVGMEGPER

SEQ ID NO: 1791 - DNA, 186 bp, Arabidopsis thaliana
  source 1..186: mol_type = genomic DNA
tagcggaatctcgggtttagcttcggagctttgcatttgatcttcgtcgtctgtgttgtcctctctcggattttgttttttcgccgctgcaaatcagagaaatctattcctggaagtgataagatcgcttggaagcgtttcagggagttgttggaatggagggtccggaaagatgagagattttga

SEQ ID NO: 1792 - protein, 60 aa, Arabidopsis thaliana
RNLGFSFGALHLIFVVCVVLSRILFFRRCKSEKSIPGSDKIAWKRFRELLEWRVRKDERF

SEQ ID NO: 1793 - DNA, 168 bp, Arabidopsis thaliana
  source 1..168: mol_type = genomic DNA
tgatcttcgtcgtctgtgttgtcctctctcggattttgttttttcgccgctgcaaatcagagaaatctattcctggaagtgataagatcgcttggaagcgtttcagggagttgttggaatggagggtccggaaagatgagagattttgaatacgcagttattctttga

SEQ ID NO: 1794 - protein, 54 aa, Arabidopsis thaliana
SSSSVLSSLGFCFFAAANQRNLFLEVIRSLGSVSGSCWNGGSGKMRDFEYAVIL

SEQ ID NO: 1795 - DNA, 54 bp, Arabidopsis thaliana
  source 1..54: mol_type = genomic DNA
tgatcgtcgtatcacagcttgtgttatcctcagcacttttgttgctgtttgtag

SEQ ID NO: 1796 - protein, 16 aa, Arabidopsis thaliana
SSYHSLCYPQHFCCCL

SEQ ID NO: 1797 - DNA, 66 bp, Arabidopsis thaliana
  source 1..66: mol_type = genomic DNA
taattcttctatatctctctctctttctctcacttcctttttttttttttttttttttttttttga

SEQ ID NO: 1798 - protein, 20 aa, Arabidopsis thaliana
FFYISLSFSHFLFFFFFFFF

SEQ ID NO: 1799 - DNA, 51 bp, Arabidopsis thaliana
  source 1..51: mol_type = genomic DNA
tgaggaatcagtttcagatttgtagaatctgcgttttatttatatttatag

SEQ ID NO: 1800 - protein, 15 aa, Arabidopsis thaliana
GISFRFVESAFYLYL

SEQ ID NO: 1801 - DNA, 51 bp, Arabidopsis thaliana
  source 1..51: mol_type = genomic DNA
tgatatagtagattcgatagacttgtctctcgagatgtgaagatggaatga

SEQ ID NO: 1802 - protein, 15 aa, Arabidopsis thaliana
YSRFDRLVSRDVKME

SEQ ID NO: 1803 - DNA, 72 bp, Arabidopsis thaliana
  source 1..72: mol_type = genomic DNA
tgagtttttaagactaatagagagatatatagagagagattgcttctggttttgccttccccctttgtttga

SEQ ID NO: 1804 - protein, 22 aa, Arabidopsis thaliana
VFKTNREIYRERLLLVLPSPFV

SEQ ID NO: 1805 - DNA, 75 bp, Arabidopsis thaliana
  source 1..75: mol_type = genomic DNA
tgaatgaatctctgtttcttgttttggaaccgagatggcttcctaacaattgggcttttctctgcctcttcctag

SEQ ID NO: 1806 - protein, 23 aa, Arabidopsis thaliana
MNLCFLFWNRDGFLTIGLFSASS

SEQ ID NO: 1807 - DNA, 105 bp, Arabidopsis thaliana
  source 1..105: mol_type = genomic DNA
tgatcccgccggagatcggccggtttccgcagtcgcattcgtttctttcgcgcgattttcgatgctttgtctatgatgaaaccgcgatcctgtttagatctatag

SEQ ID NO: 1808 - protein, 33 aa, Arabidopsis thaliana
SRRRSAGFRSRIRFFRAIFDALSMMKPRSCLDL

SEQ ID NO: 1809 - DNA, 105 bp, Arabidopsis thaliana; identical to SEQ ID NO: 1807
  source 1..105: mol_type = genomic DNA

SEQ ID NO: 1810 - protein, 33 aa, Arabidopsis thaliana; identical to SEQ ID NO: 1808

SEQ ID NO: 1811 - DNA, 183 bp, Arabidopsis thaliana
  source 1..183: mol_type = genomic DNA
taaatcaaatctgttttcatcgtcccccaattccaaatgccaaactctttctcttcttctgacccatttctcaaaattctcaacttttccttcttttcactgatttgttttctcttcaattcttttaggtcagaaattctcagtgagagagagacgaaagtgaaagactttcgttgtttttag

SEQ ID NO: 1812 - protein, 59 aa, Arabidopsis thaliana
IKSVFIVPQFQMPNSFSSSDPFLKILNFSFFSLICFLFNSFRSEILSERETKVKDFRCF

SEQ ID NO: 1813 - DNA, 63 bp, Arabidopsis thaliana
  source 1..63: mol_type = genomic DNA
tgatttgttttctcttcaattcttttaggtcagaaattctcagtgagagagagacgaaagtga

SEQ ID NO: 1814 - protein, 19 aa, Arabidopsis thaliana
FVFSSILLGQKFSVRERRK

SEQ ID NO: 1815 - DNA, 171 bp, Arabidopsis thaliana
  source 1..171: mol_type = genomic DNA
taattccgaggagcagaaacagcagcagcaacggcgtttggcagagcaatagtaacggttactatagctatggatatggaggaggatacgtggagaagagacaactattccttaagagctaccaattctcgaggaaacagagtttcacagagaagattaagatatccatga

SEQ ID NO: 1816 - protein, 55 aa, Arabidopsis thaliana
FRGAETAAATAFGRAIVTVTIAMDMEEDTWRRDNYSLRATNSRGNRVSQRRLRYP

SEQ ID NO: 1817 - DNA, 180 bp, Arabidopsis thaliana
  source 1..180: mol_type = genomic DNA
tgatttgggaactcgtgcgcggctgtggcagaggccaaacccacccgtgtactccatccgtcggatccaccaaaccaatattctttcatctctctctctctctctctctctcttcttcttcgtcttcttctctttttattctttcttcaggaacaaattcctctgctttgggcattttag

SEQ ID NO: 1818 - protein, 58 aa, Arabidopsis thaliana
FGNSCAAVAEAKPTRVLHPSDPPNQYSFISLSLSLSLLLRLLLFLFFLQEQIPLLWAF

SEQ ID NO: 1819 - DNA, 255 bp, Arabidopsis thaliana
  source 1..255: mol_type = genomic DNA
tgaaaaaagaaagaagaattcgaacaacagcagcaacaagataaagttacgaatttttcctcttttgtaacctttgtttctcttcttcctcttcctccatttttttccattaaagattctgcctttgggttccaatttcgtctttcctttttcgattttgccgcgtttaacatgacattcgcaaaaccctacacttttctggacgccattgttgaatcccacgaatttcgtttccctagagattgcttgttctag

SEQ ID NO: 1820 - protein, 83 aa, Arabidopsis thaliana
KKKEEFEQQQQQDKVTNFSSFVTFVSLLPLPPFFSIKDSAFGFQFRLSFFDFAAFNMTFAKPYTFLDAIVESHEFRFPRDCLF

SEQ ID NO: 1821 - DNA, 168 bp, Arabidopsis thaliana
  source 1..168: mol_type = genomic DNA
taaggaaaaaaacaactcagctttgatttgttcatcattacagtaaccaaaaaagatggcttcatctatattgctaacactcatcaccttcatctttctctcctcactttctctctcttcgccgacgacaaatacaatcccatcttcgcaaacaatctctccctctga

SEQ ID NO: 1822 - protein, 54 aa, Arabidopsis thaliana
GKKQLSFDLFIITVTKKDGFIYIANTHHLHLSLLTFSLFADDKYNPIFANNLSL

SEQ ID NO: 1823 - DNA, 102 bp, Arabidopsis thaliana
  source 1..102: mol_type = genomic DNA
taaacgtttctctcgcgtcatttcaattccattttctctacttttgttcttctgttagggagcgagagattagatagtcaaaatcaaatcgacatggattaa

SEQ ID NO: 1824 - protein, 32 aa, Arabidopsis thaliana
TFLSRHFNSIFSTFVLLLGSERLDSQNQIDMD

SEQ ID NO: 1825 - DNA, 150 bp, Arabidopsis thaliana
  source 1..150: mol_type = genomic DNA
tagaagatcgtcctcaaatatctcacagaagttaccaattttgaaagatcactagagatagctacggattttgagaggcggatctgtccaggtcggcactgtgaaagagaactacactggttttttccagatgatatgaagcttccgtga

SEQ ID NO: 1826 - protein, 48 aa, Arabidopsis thaliana
KIVLKYLTEVTNFERSLEIATDFERRICPGRHCERELHWFFPDDMKLP

SEQ ID NO: 1827 - DNA, 87 bp, Arabidopsis thaliana
  source 1..87: mol_type = genomic DNA
tgaagccaaaggcatcgtgagcaaaatccgcagttttctacattaatggattgtttctgttctagagcttctcttccgtctctgtga

SEQ ID NO: 1828 - protein, 27 aa, Arabidopsis thaliana
SQRHREQNPQFSTLMDCFCSRASLPSL

SEQ ID NO: 1829 - DNA, 177 bp, Arabidopsis thaliana
  source 1..177: mol_type = genomic DNA
taaagaagcacatctctttactcatttcacgattcccctgtctcttgtttctctctcacttacctcttctcgagttttctcccattcttgggtcttcatcgagaccaaatccggagaaagttgatgtttttacagcacaaacagacacagacacatacatgtgttgtgtctccctaa

SEQ ID NO: 1830 - protein, 57 aa, Arabidopsis thaliana
RSTSLYSFHDSPVSCFSLTYLFSSFLPFLGLHRDQIRRKLMFLQHKQTQTHTCVVSP

SEQ ID NO: 1831 - DNA, 69 bp, Arabidopsis thaliana
  source 1..69: mol_type = genomic DNA
tagcaagcaaaatttctgcttcagcgctctcgttctgttttggtatttggattttcaatcatggattga

SEQ ID NO: 1832 - protein, 21 aa, Arabidopsis thaliana
QAKFLLQRSRSVLVFGFSIMD

SEQ ID NO: 1833 - DNA, 198 bp, Arabidopsis thaliana
  source 1..198: mol_type = genomic DNA
taagaatttgccagaggggatattcgcacagagagagaaagaagatctttttccgacaaggttcaagatcgattaaacattacatggaggagattcactagaaagaaaggaaaaaaatctctttgtctttgcagatgcgacacgcaaaacgacgattctgatctcgcttgtctgatttcaaaaacaatgagaagatag

SEQ ID NO: 1834 - protein, 64 aa, Arabidopsis thaliana
EFARGDIRTERERRSFSDKVQDRLNITWRRFTRKKGKKSLCLCRCDTQNDDSDLACLISKTMRR

SEQ ID NO: 1835 - DNA, 234 bp, Arabidopsis thaliana
  source 1..234: mol_type = genomic DNA
tgaaactgtaacatcgagatttacgtttctccgtcggcgtcacgccgaagcttccatactccagaaaccccaaaacgcttatttctcaaaaatctccactctctctcttctgaatcttcaatcacttggggttgtgtcactgaatctgcatcaatggcgattccagattcctcactcttttctgcttttgactttagctctagcttcttcttcacgaaatgccgttgttgttaa

SEQ ID NO: 1836 - protein, 76 aa, Arabidopsis thaliana
NCNIEIYVSPSASRRSFHTPETPKRLFLKNLHSLSSESSITWGCVTESASMAIPDSSLFSAFDFSSSFFFTKCRCC

SEQ ID NO: 1837 - DNA, 69 bp, Arabidopsis thaliana
  source 1..69: mol_type = genomic DNA
taaaatcgggaaacaacaagagcttcttctccttgttattggattgccttttgccagcctttgttttag

SEQ ID NO: 1838 - protein, 21 aa, Arabidopsis thaliana
NRETTRASSPCYWIAFCQPLF

SEQ ID NO: 1839 - DNA, 144 bp, Arabidopsis thaliana
  source 1..144: mol_type = genomic DNA
tgagcttataaaaccttcatggcatttgcgcacttctgcagcatccactgtttccttaaaatcgggaaacaacaagagcttcttctccttgttattggattgccttttgccagcctttgttttagtcagttttctcctcattaa

SEQ ID NO: 1840 - protein, 46 aa, Arabidopsis thaliana
AYKTFMAFAHFCSIHCFLKIGKQQELLLLVIGLPFASLCFSQFSPH

SEQ ID NO: 1841 - DNA, 180 bp, Arabidopsis thaliana
  source 1..180: mol_type = genomic DNA
tgatttgcgagtcgttgtgttccaactctcattcttttgcacctggatttcttccattttcagatagatggttctatgaatgttgctgagaatcagatattagttaggccatcttggacatgggaatccagaatattttatggcaagtggcgaagaaatcattcactggaagtattatag

SEQ ID NO: 1842 - protein, 58 aa, Arabidopsis thaliana
FASRCVPTLILLHLDFFHFQIDGSMNVAENQILVRPSWTWESRIFYGKWRRNHSLEVL

SEQ ID NO: 1843 - DNA, 99 bp, Arabidopsis thaliana
  source 1..99: mol_type = genomic DNA
tagttaggccatcttggacatgggaatccagaatattttatggcaagtggcgaagaaatcattcactggaagtattatagggcttaccatttcagatag

SEQ ID NO: 1844 - protein, 31 aa, Arabidopsis thaliana
LGHLGHGNPEYFMASGEEIIHWKYYRAYHFR

SEQ ID NO: 1845 - DNA, 54 bp, Arabidopsis thaliana
  source 1..54: mol_type = genomic DNA
taaggaattcgcagagtctgctttagaagaaaccaggaaaaggatcgttcttga

SEQ ID NO: 1846 - protein, 16 aa, Arabidopsis thaliana
GIRRVCFRRNQEKDRS

SEQ ID NO: 1847 - DNA, 135 bp, Arabidopsis thaliana
  source 1..135: mol_type = genomic DNA
taatttcttcttctgttacaagttcttttcactgtgaaagtaattcttcaatggcgaaagacggacctaattgggatggtttgcttaagtggagtctctctcacgccgacggtactcgacccactcgccagttga

SEQ ID NO: 1848 - protein, 43 aa, Arabidopsis thaliana
FLLLLQVLFTVKVILQWRKTDLIGMVCLSGVSLTPTVLDPLAS

SEQ ID NO: 1849 - DNA, 210 bp, Arabidopsis thaliana
  source 1..210: mol_type = genomic DNA
tagccgactcttcctctttattattacaaagacgaaaaggcttcgagttttgtaatttcttcttctgttacaagttcttttcactgtgaaagtaattcttcaatggcgaaagacggacctaattgggatggtttgcttaagtggagtctctctcacgccgacggtactcgacccactcgccagttgaggtatctgtgtggctatgattga

SEQ ID NO: 1850 - protein, 68 aa, Arabidopsis thaliana
PTLPLYYYKDEKASSFVISSSVTSSFHCESNSSMAKDGPNWDGLLKWSLSHADGTRPTRQLRYLCGYD

SEQ ID NO: 1851 - DNA, 69 bp, Arabidopsis thaliana
  source 1..69: mol_type = genomic DNA
taagtggagtctctctcacgccgacggtactcgacccactcgccagttgaggtatctgtgtggctatga

SEQ ID NO: 1852 - protein, 21 aa, Arabidopsis thaliana
VESLSRRRYSTHSPVEVSVWL

SEQ ID NO: 1853 - DNA, 135 bp, Arabidopsis thaliana; identical to SEQ ID NO: 1847
  source 1..135: mol_type = genomic DNA

SEQ ID NO: 1854 - protein, 43 aa, Arabidopsis thaliana; identical to SEQ ID NO: 1848

SEQ ID NO: 1855 - DNA, 84 bp, Arabidopsis thaliana
  source 1..84: mol_type = genomic DNA
taaaaattccgagaatctttttatcaacccaatattttttttttatcccccgagagagaaatttcaatgaaattcttagtatag

SEQ ID NO: 1856 - protein, 26 aa, Arabidopsis thaliana
KFRESFYQPNIFFLSPEREISMKFLV

SEQ ID NO: 1857 - DNA, 165 bp, Arabidopsis thaliana
  source 1..165: mol_type = genomic DNA
tgatttcgatggaatccttttgggaatgggaaacccactcctcgacgtctctgccgtcgtcgaccaacagtttctcgacaaatacgacatcaaattgaacaatgcgattctcgcagaggacaaacatttgcccatgtaagtgaattcactttttctcaatcctag

SEQ ID NO: 1858 - protein, 53 aa, Arabidopsis thaliana
FRWNPFGNGKPTPRRLCRRRPTVSRQIRHQIEQCDSRRGQTFAHVSEFTFSQS

SEQ ID NO: 1859 - DNA, 123 bp, Arabidopsis thaliana
  source 1..123: mol_type = genomic DNA
taacatcatcatccatggcttcctctgatttcgatggaatccttttgggaatgggaaacccactcctcgacgtctctgccgtcgtcgaccaacagtttctcgacaaatacgacatcaaattga

SEQ ID NO: 1860 - protein, 39 aa, Arabidopsis thaliana
HHHPWLPLISMESFWEWETHSSTSLPSSTNSFSTNTTSN

SEQ ID NO: 1861 - DNA, 81 bp, Arabidopsis thaliana
  source 1..81: mol_type = genomic DNA
tagctgagcacattctgtttcaccagtttactggaggtagcttcatgttttgttgaaagaatgttctccttaaggctgtga

SEQ ID NO: 1862 - protein, 25 aa, Arabidopsis thaliana
LSTFCFTSLLEVASCFVERMFSLRL

SEQ ID NO: 1863 - DNA, 60 bp, Arabidopsis thaliana
  source 1..60: mol_type = genomic DNA
tgaatagctgagcacattctgtttcaccagtttactggaggtagcttcatgttttgttga

SEQ ID NO: 1864 - protein, 18 aa, Arabidopsis thaliana
IAEHILFHQFTGGSFMFC

SEQ ID NO: 1865 - DNA, 81 bp, Arabidopsis thaliana; identical to SEQ ID NO: 1861
  source 1..81: mol_type = genomic DNA

SEQ ID NO: 1866 - protein, 25 aa, Arabidopsis thaliana
LSTFCFTSLLEVASCFVERMFSLRL

SEQ ID NO: 1867 - DNA, 60 bp, Arabidopsis thaliana; identical to SEQ ID NO: 1863
  source 1..60: mol_type = genomic DNA

SEQ ID NO: 1868 - protein, 18 aa, Arabidopsis thaliana
IAEHILFHQFTGGSFMFC

SEQ ID NO: 1869 - DNA, 204 bp, Arabidopsis thaliana
  source 1..204: mol_type = genomic DNA
taaataaacaaattctcaatccttttattagagaagccttcttctccaaagtctcgatttctctttattcttccaaattcttttgtctctctgtatcatccaaaattcccagatttattcacggagttagaagaagaagatgaggagagttttcggcgcgaaaaagaacacagagcctcctccgtccattcaggatgcctctga

SEQ ID NO: 1870 - protein, 66 aa, Arabidopsis thaliana
INKFSILLLEKPSSPKSRFLFILPNSFVSLYHPKFPDLFTELEEEDEESFRREKEHRASSVHSGCL

SEQ ID NO: 1871 - DNA, 189 bp, Arabidopsis thaliana
  source 1..189: mol_type = genomic DNA
taaatatttttgcctcctcccatctttacacacaagtcacgaggaagaagcaaatcagaaaaagatcaaagctcagaaataaagagtacagagattaattcattaagagtttttaagaacatgagggatatcgattctctcttctccatctcttttgtcattcgatttgtccaacaagacgagtcttga

SEQ ID NO: 1872 - protein, 61 aa, Arabidopsis thaliana
IFLPPPIFTHKSRGRSKSEKDQSSEIKSTEINSLRVFKNMRDIDSLFSISFVIRFVQQDES

SEQ ID NO: 1873 - DNA, 69 bp, Arabidopsis thaliana
  source 1..69: mol_type = genomic DNA
tgaaagccaattctatttggttcctccttgataatccacccaatcgctgtcattctcccatcaatctag

SEQ ID NO: 1874 - protein, 21 aa, Arabidopsis thaliana
KPILFGSSLIIHPIAVILPSI

SEQ ID NO: 1875 - DNA, 63 bp, Arabidopsis thaliana
  source 1..63: mol_type = genomic DNA
taatccacccaatcgctgtcattctcccatcaatctagctgctttcacaaaccattgtactga

SEQ ID NO: 1876 - protein, 19 aa, Arabidopsis thaliana
STQSLSFSHQSSCFHKPLY

SEQ ID NO: 1877 - DNA, 78 bp, Arabidopsis thaliana
  source 1..78: mol_type = genomic DNA
tgactagaaacggagaatttccaaatgttgaatttgttggatgcatgtgaaagccaattctatttggttcctccttga

SEQ ID NO: 1878 - protein, 24 aa, Arabidopsis thaliana
LETENFQMLNLLDACESQFYLVPP

SEQ ID NO: 1879 - DNA, 90 bp, Arabidopsis thaliana
  source 1..90: mol_type = genomic DNA
tgaagttgtcgccggaaagttcgggtccttggtgttgaatgctcttccgaaagggagtcgtccggggtctggacccagcaagaaaactaa

SEQ ID NO: 1880 - protein, 28 aa, Arabidopsis thaliana
SCRRKVRVLGVECSSERESSGVWTQQEN

SEQ ID NO: 1881 - DNA, 318 bp, Arabidopsis thaliana
  source 1..318: mol_type = genomic DNA
tagtccacaaaaagatttttacagatggcgattaacagatctttacttttgattcttcttttcatctctgtttctctatcgacggcgaggatcttacccggagagtttgttccagtcatcttctccggagagatccctcctgtttctaagtcggcggtggttggttgcggaggcgagcaggagaccaagacggaatattcttcttttgttcctgaagttgtcgccggaaagttcgggtccttggtgttgaatgctcttccgaaagggagtcgtccggggtctggacccagcaagaaaactaacgacgtcaagacttag

SEQ ID NO: 1882 - protein, 104 aa, Arabidopsis thaliana
STKRFLQMAINRSLLLILLFISVSLSTARILPGEFVPVIFSGEIPPVSKSAVVGCGGEQETKTEYSSFVPEVVAGKFGSLVLNALPKGSRPGSGPSKKTNDVKT

SEQ ID NO: 1883 - DNA, 60 bp, Arabidopsis thaliana
  source 1..60: mol_type = genomic DNA
tgaagagatcttcaaagattattccgctcgtcgtgccgctcttcttcgtgctctcactaa

SEQ ID NO: 1884 - protein, 18 aa, Arabidopsis thaliana
RDLQRLFRSSCRSSSCSH

SEQ ID NO: 1885 - DNA, 123 bp, Arabidopsis thaliana
  source 1..123: mol_type = genomic DNA
taaaaatctgtagagatatggccgccgcagccgtttcctctaaccctcgcaccgttgaagagatcttcaaagattattccgctcgtcgtgccgctcttcttcgtgctctcactaaaggtctaa

SEQ ID NO: 1886 - protein, 39 aa, Arabidopsis thaliana
KSVEIWPPQPFPLTLAPLKRSSKIIPLVVPLFFVLSLKV

SEQ ID NO: 1887 - DNA, 69 bp, Arabidopsis thaliana
  source 1..69: mol_type = genomic DNA
taacttgttcgtttttgtgattttttccagatgttgatgatttttactctcaatgcgatccgggtatga

SEQ ID NO: 1888 - protein, 21 aa, Arabidopsis thaliana
LVRFCDFFQMLMIFTLNAIRV

SEQ ID NO: 1889 - DNA, 165 bp, Arabidopsis thaliana
  source 1..165: mol_type = genomic DNA
taaaaattagtaacatttttaaaaagagagagcttaagccaaagatctctcattgacctttgcttcttcatcttcttctccgatcacagtttctctctttctggattccaccattcttctctttgtcgtctatgtgacctattctcgattcgatccatggaataa

SEQ ID NO: 1890 - protein, 53 aa, Arabidopsis thaliana
KLVTFLKRESLSQRSLIDLCFFIFFSDHSFSLSGFHHSSLCRLCDLFSIRSME

SEQ ID NO: 1891 - DNA, 180 bp, Arabidopsis thaliana
  source 1..180: mol_type = genomic DNA
taattttcattttgctctcaaatcgcgactcctctctgggctctctccttctgtatctctctaaggggaacaacgaaatcatcaccttctcttttatcgtcaccggcgatcattcaagactcgatctccggtaatcagaacattttcattcgccgacatggcgatgaccatcgaaggtaa

SEQ ID NO: 1892 - protein, 58 aa, Arabidopsis thaliana
FSFCSQIATPLWALSFCISLRGTTKSSPSLLSSPAIIQDSISGNQNIFIRRHGDDHRR

SEQ ID NO: 1893 - DNA, 207 bp, Arabidopsis thaliana
  source 1..207: mol_type = genomic DNA
tgaattcattctctacaattacgaaaattccttaataccttttttgtcctcttttttttgtttgtttacgcgatagaaaaaacgtttctcgttctgtttctctgtttcgtggacgggagacaaaattctctccaatttctgggtcgccaagggaattggcttcagctggattttttttttttttttttcctgagaagcttccgatga

SEQ ID NO: 1894 - protein, 67 aa, Arabidopsis thaliana
IHSLQLRKFLNTFFVLFFLFVYAIEKTFLVLFLCFVDGRQNSLQFLGRQGNWLQLDFFFFFFLRSFR

SEQ ID NO: 1895 - DNA, 180 bp, Arabidopsis thaliana
  source 1..180: mol_type = genomic DNA
taataccttttttgtcctcttttttttgtttgtttacgcgatagaaaaaacgtttctcgttctgtttctctgtttcgtggacgggagacaaaattctctccaatttctgggtcgccaagggaattggcttcagctggattttttttttttttttttcctgagaagcttccgatgatttag

SEQ ID NO: 1896 - protein, 58 aa, Arabidopsis thaliana
YLFCPLFFVCLRDRKNVSRSVSLFRGRETKFSPISGSPRELASAGFFFFFFPEKLPMI

SEQ ID NO: 1897 - DNA, 66 bp, Arabidopsis thaliana
  source 1..66: mol_type = genomic DNA
taaataaaagtcttgataggtgggcgatttcaacatacctcctccgtcgtcgtcggcttccattga

SEQ ID NO: 1898 - protein, 20 aa, Arabidopsis thaliana
IKVLIGGRFQHTSSVVVGFH

SEQ ID NO: 1899 - DNA, 81 bp, Arabidopsis thaliana
  source 1..81: mol_type = genomic DNA
taatcagaccccattctagagagagaagagggaagtcaggtgaagatagagagagacactgagaggagggaaaatttgtag

SEQ ID NO: 1900 - protein, 25 aa, Arabidopsis thaliana
SDPILEREEGSQVKIERDTERRENL

SEQ ID NO: 1901 - DNA, 99 bp, Arabidopsis thaliana
  source 1..99: mol_type = genomic DNA
tgaagtttcgagctgaatctcttcttctctacacgcgatttctctgctcgtagatgtaaaacaataacgcgaggcggtgatgaacaacaaattgagtga

SEQ ID NO: 1902 - protein, 31 aa, Arabidopsis thaliana
SFELNLFFSTRDFSARRCKTITRGGDEQQIE

SEQ ID NO: 1903 - DNA, 114 bp, Arabidopsis thaliana
  source 1..114: mol_type = genomic DNA
taggacaatgttttggagcttatagtcaaattctgtgaaaactttgaggtgggaattgtgagatcctgtatgatgaagatatccttgaattgcatatatggctttgttgattga

SEQ ID NO: 1904 - protein, 36 aa, Arabidopsis thaliana
DNVLELIVKFCENFEVGIVRSCMMKISLNCIYGFVD

SEQ ID NO: 1905 - DNA, 66 bp, Arabidopsis thaliana
  source 1..66: mol_type = genomic DNA
tgaggtgggaattgtgagatcctgtatgatgaagatatccttgaattgcatatatggctttgttga

SEQ ID NO: 1906 - protein, 20 aa, Arabidopsis thaliana
GGNCEILYDEDILELHIWLC

SEQ ID NO: 1907 - DNA, 90 bp, Arabidopsis thaliana
  source 1..90: mol_type = genomic DNA
taatcccaaccggagttacgattccttcttatcgtaactcctgcttccgatctcgatccaattttcacttttgttttgtccgaacggtaa

SEQ ID NO: 1908 - protein, 28 aa, Arabidopsis thaliana
SQPELRFLLIVTPASDLDPIFTFVLSER

SEQ ID NO: 1909 - DNA, 87 bp, Arabidopsis thaliana
  source 1..87: mol_type = genomic DNA
taactcctgcttccgatctcgatccaattttcacttttgttttgtccgaacggtaaatcatttcgcggctttttttttttaaggtaa

SEQ ID NO: 1910 - protein, 27 aa, Arabidopsis thaliana
LLLPISIQFSLLFCPNGKSFRGFFFLR

SEQ ID NO: 1911 - DNA, 117 bp, Arabidopsis thaliana
  source 1..117: mol_type = genomic DNA
taaccatgtcggaagcatcttgtcttgcttctcctttgctctacaccaattctggaatccattctgattctttctacgcttcgcttattgatagtgccactcataaagctcagctga

SEQ ID NO: 1912 - protein, 37 aa, Arabidopsis thaliana
PCRKHLVLLLLCSTPILESILILSTLRLLIVPLIKLS

SEQ ID NO: 1913 - DNA, 162 bp, Arabidopsis thaliana
  source 1..162: mol_type = genomic DNA
taaggcagagagatagatattttttctgggggagaatctagcagaagaagcctactagggtttggtttcttgagtcacatagatcttcttctctatctgtctctcttggattcttcaatgttcactttcagtcattggaaaaaaagggactatgtaatctaa

SEQ ID NO: 1914 - protein, 52 aa, Arabidopsis thaliana
GREIDIFSGGESSRRSLLGFGFLSHIDLLLYLSLLDSSMFTFSHWKKRDYVI

SEQ ID NO: 1915 - DNA, 105 bp, Arabidopsis thaliana
  source 1..105: mol_type = genomic DNA
tgaatcaggaatttgcaagtatgcgtgaacaaaggagcaagaaacaatgatctaaagaagatgaagttccacttactgttagagagacgtttcctaagatggtga

SEQ ID NO: 1916 - protein, 33 aa, Arabidopsis thaliana
IRNLQVCVNKGARNNDLKKMKFHLLLERRFLRW

SEQ ID NO: 1917 - DNA, 57 bp, Arabidopsis thaliana
  source 1..57: mol_type = genomic DNA
taggaagtcatgtggttcagaataggcaattcacgtgcaatgacagagataaagtaa

SEQ ID NO: 1918 - protein, 17 aa, Arabidopsis thaliana
EVMWFRIGNSRAMTEIK

SEQ ID NO: 1919 - DNA, 57 bp, Arabidopsis thaliana; identical to SEQ ID NO: 1917
  source 1..57: mol_type = genomic DNA

SEQ ID NO: 1920 - protein, 17 aa, Arabidopsis thaliana
EVMWFRIGNSRAMTEIK

SEQ ID NO: 1921 - DNA, 78 bp, Arabidopsis thaliana
  source 1..78: mol_type = genomic DNA
tgagttttgattagtaaaatgattcgtgatttgattttgatttctctgtttttattatctctggttggtttggtttga

SEQ ID NO: 1922 - protein, 24 aa, Arabidopsis thaliana
VLISKMIRDLILISLFLLSLVGLV

SEQ ID NO: 1923 - DNA, 180 bp, Arabidopsis thaliana
  source 1..180: mol_type = genomic DNA
tagatccggcggactcaagtcccacagctttgtggccgcctccgagaatcgtccaccaccgacgaaagattccggttttcgtctgtagagactcaactccaacgcaccaacccaccacaagactcccggaaagctagccgctccgacgtagcggttccacggaaccggatcccgacctag

SEQ ID NO: 1924 - protein, 58 aa, Arabidopsis thaliana
IRRTQVPQLCGRLRESSTTDERFRFSSVETQLQRTNPPQDSRKASRSDVAVPRNRIPT

SEQ ID NO: 1925 - DNA, 114 bp, Arabidopsis thaliana
  source 1..114: mol_type = genomic DNA
tagtcttcttctttctcttcgccctctcaacatacatcgttgcagaaatcaatcgtgtttcgagctgcgcgattgcattggtcaggtttaggaaagctatgtgtgttttggtag

SEQ ID NO: 1926 - protein, 36 aa, Arabidopsis thaliana
SSSFSSPSQHTSLQKSIVFRAARLHWSGLGKLCVFW

SEQ ID NO: 1927 - DNA, 252 bp, Arabidopsis thaliana
  source 1..252: mol_type = genomic DNA
taggaatctatttggtcgcttttgcttcctcctattctggggagaatttgggatcttggagttgaatccgttgtgagaagaaggatctttttgagcttgtgtactgtgtcctctcagttgattcatcgcagagagaagaggtcctgtcatgtctatgagttttgtattcatctgaaaggtcttactggaatgacttatcaaaggggagagtctttggttcctgtcttgatttccaacttggtgggggcatag

SEQ ID NO: 1928 - protein, 82 aa, Arabidopsis thaliana
ESIWSLLLPPILGRIWDLGVESVVRRRIFLSLCTVSSQLIHRREKRSCHVYEFCIHLKGLTGMTYQRGESLVPVLISNLVGA

SEQ ID NO: 1929 - DNA, 117 bp, Arabidopsis thaliana
  source 1..117: mol_type = genomic DNA
tgagttttgtattcatctgaaaggtcttactggaatgacttatcaaaggggagagtctttggttcctgtcttgatttccaacttggtgggggcataggccaaataatgcaaacctaa

SEQ ID NO: 1930 - protein, 37 aa, Arabidopsis thaliana
VLYSSERSYWNDLSKGRVFGSCLDFQLGGGIGQIMQT

SEQ ID NO: 1931 - DNA, 120 bp, Arabidopsis thaliana
  source 1..120: mol_type = genomic DNA
tgagacttcaggactgacgtcacacccttcgtcttaaaacgattgatctccatttttatgtatattctattgtttttgatcatcttatgtgtaattatagtttatggtgtaaccgtgtaa

SEQ ID NO: 1932 - protein, 38 aa, Arabidopsis thaliana
DFRTDVTPFVLKRLISIFMYILLFLIILCVIIVYGVTV

SEQ ID NO: 1933 - DNA, 624 bp, Arabidopsis thaliana
  source 1..624: mol_type = genomic DNA
taaaacaataaatcagaacagttttacattatttcaatcaagtcatcttattcactaatggcgaacaacgacgagattaccacgtcgtctcatgcatctccggcagtgaatcacgagtctatctcacgcgctaagcaacgtatcaaagacggactagccacgcgccgctcctggagggtgatgttcgatttacactccacgggactacctcacggcgtctccgatgttttctcaagaatcaagacaaatcttgcttacttccgtagtaattacgcaatcgtaatcttgaacgtcatattcttcagcttgatttggcatccgacctcgctcatcgtctttaccggtttggttttcctatggatcttcctttattttctccgtgatgtgcctctcaaggtgttcaggtttcaaatcgacgatcgtgcggtcttgattggtctatcggtgattaccatcgttctacttctattgaccaacgcgacgtttaatattgttgcggcgttgatggccggagctgtgttggttctgatccatgcggtgattaggaagacggatgatctttttttggatgaagaagcggcgacgactgagacttcaggactgacgtcacacccttcgtcttaa

SEQ ID NO: 1934 - protein, 206 aa, Arabidopsis thaliana
NNKSEQFYIISIKSSYSLMANNDEITTSSHASPAVNHESISRAKQRIKDGLATRRSWRVMFDLHSTGLPHGVSDVFSRIKTNLAYFRSNYAIVILNVIFFSLIWHPTSLIVFTGLVFLWIFLYFLRDVPLKVFRFQIDDRAVLIGLSVITIVLLLLTNATFNIVAALMAGAVLVLIHAVIRKTDDLFLDEEAATTETSGLTSHPSS

SEQ ID NO: 1935 - DNA, 66 bp, Arabidopsis thaliana
  source 1..66: mol_type = genomic DNA
tgattaggaagacggatgatctttttttggatgaagaagcggcgacgactgagacttcaggactga

SEQ ID NO: 1936 - protein, 20 aa, Arabidopsis thaliana
LGRRMIFFWMKKRRRLRLQD

SEQ ID NO: 1937 - DNA, 624 bp, Arabidopsis thaliana; identical to SEQ ID NO: 1933
  source 1..624: mol_type = genomic DNA

SEQ ID NO: 1938 - protein, 206 aa, Arabidopsis thaliana; identical to SEQ ID NO: 1934

SEQ ID NO: 1939 - DNA, 66 bp, Arabidopsis thaliana; identical to SEQ ID NO: 1935
  source 1..66: mol_type = genomic DNA

SEQ ID NO: 1940 - protein, 20 aa, Arabidopsis thaliana
LGRRMIFFWMKKRRRLRLQD

SEQ ID NO: 1941 - DNA, 51 bp, Arabidopsis thaliana
  source 1..51: mol_type = genomic DNA
taaaattggaacgatacagagaagattagcatggcccctgcgcaaggatga

SEQ ID NO: 1942 - protein, 15 aa, Arabidopsis thaliana
NWNDTEKISMAPAQG

SEQ ID NO: 1943 - DNA, 141 bp, Arabidopsis thaliana
  source 1..141: mol_type = genomic DNA
tagctgttctttcctttcatgattttgcttcctgcggaaaatcaaagagttagctcagctccgatcactctctccgattatctttcgctctttagattcatggtgaatcgtttaccgtcactctctcctcgtaaaccctag

SEQ ID NO: 1944 - protein, 45 aa, Arabidopsis thaliana
LFFPFMILLPAENQRVSSAPITLSDYLSLFRFMVNRLPSLSPRKP

SEQ ID NO: 1945 - DNA, 75 bp, Arabidopsis thaliana
  source 1..75: mol_type = genomic DNA
taaagagagaaaaaaagaagaagaaagaagccatgttttgaggaaggagacatgcatcatctcatccttttatga

SEQ ID NO: 1946 - protein, 23 aa, Arabidopsis thaliana
REKKRRRKKPCFEEGDMHHLILL

SEQ ID NO: 1947 - DNA, 60 bp, Arabidopsis thaliana
  source 1..60: mol_type = genomic DNA
taaggagcgacaaggaaagggaatcttacaaacgccatttgccagtgtgggatctcttga

SEQ ID NO: 1948 - protein, 18 aa, Arabidopsis thaliana
GATRKGNLTNAICQCGIS

SEQ ID NO: 1949 - DNA, 144 bp, Arabidopsis thaliana
  source 1..144: mol_type = genomic DNA
tagtcagaaaacctggggatcatcctcctttctccaaaattatacattcgtcttcacagcctaaggagcgacaaggaaagggaatcttacaaacgccatttgccagtgtgggatctcttgacaagttttcagcttttgaggtag

SEQ ID NO: 1950 - protein, 46 aa, Arabidopsis thaliana
SENLGIILLSPKLYIRLHSLRSDKERESYKRHLPVWDLLTSFQLLR

SEQ ID NO: 1951 - DNA, 90 bp, Arabidopsis thaliana
  source 1..90: mol_type = genomic DNA
tagattacggcggaaggaaggagacacacaatgatgggagagatattgaatccatcagcggaagtgaaattaattacgaagttgacttga

SEQ ID NO: 1952 - protein, 28 aa, Arabidopsis thaliana
ITAEGRRHTMMGEILNPSAEVKLITKLT

SEQ ID NO: 1953 - DNA, 90 bp, Arabidopsis thaliana; identical to SEQ ID NO: 1951
  source 1..90: mol_type = genomic DNA

SEQ ID NO: 1954 - protein, 28 aa, Arabidopsis thaliana
ITAEGRRHTMMGEILNPSAEVKLITKLT

SEQ ID NO: 1955 - DNA, 123 bp, Arabidopsis thaliana
  source 1..123: mol_type = genomic DNA
tgaagccaaaaacagaagaaaacaatcttcattgttagggttttaataagctttaagaagaggatgctgaatatagaaagcagagaaagaatctcgacaatgatagtaactattcgaatgtga

SEQ ID NO: 1956 - protein, 39 aa, Arabidopsis thaliana
SQKQKKTIFIVRVLISFKKRMLNIESRERISTMIVTIRM

SEQ ID NO: 1957 - DNA, 174 bp, Arabidopsis thaliana
  source 1..174: mol_type = genomic DNA
tagaccacaacccatctgatatttgtccgcatctccacaaccattcttcacctccaacttctcatccatattataatccaacttgccaataattttttcaactgttacagattactacatcaacgaaatattaaacatttaaccatatataaaagttggagatatatgatataa

SEQ ID NO: 1958 - protein, 56 aa, Arabidopsis thaliana
TTTHLIFVRISTTILHLQLLIHIIIQLANNFFNCYRLLHQRNIKHLTIYKSWRYMI

SEQ ID NO: 1959 - DNA, 120 bp, Arabidopsis thaliana
  source 1..120: mol_type = genomic DNA
taactaatcaaaatccacgagaacaaacaaaaactgaaatcatcttattacttgtttctttgtcctttcctaaccaacacacatgaagtgcgactcgtttcggatggttttgtttcatga

SEQ ID NO: 1960 - protein, 38 aa, Arabidopsis thaliana
LIKIHENKQKLKSSYYLFLCPFLTNTHEVRLVSDGFVS

SEQ ID NO: 1961 - DNA, 63 bp, Arabidopsis thaliana
  source 1..63: mol_type = genomic DNA
taaccaacacacatgaagtgcgactcgtttcggatggttttgtttcatgagattgttgtttga

SEQ ID NO: 1962 - protein, 19 aa, Arabidopsis thaliana
PTHMKCDSFRMVLFHEIVV

SEQ ID NO: 1963 - DNA, 120 bp, Arabidopsis thaliana; identical to SEQ ID NO: 1959
  source 1..120: mol_type = genomic DNA

SEQ ID NO: 1964 - protein, 38 aa, Arabidopsis thaliana; identical to SEQ ID NO: 1960

SEQ ID NO: 1965 - DNA, 63 bp, Arabidopsis thaliana; identical to SEQ ID NO: 1961
  source 1..63: mol_type = genomic DNA

SEQ ID NO: 1966 - protein, 19 aa, Arabidopsis thaliana
PTHMKCDSFRMVLFHEIVV

SEQ ID NO: 1967 - DNA, 57 bp, Arabidopsis thaliana
  source 1..57: mol_type = genomic DNA
taaaaaaaaaaagagagagattctctcaaatatgggttagtccacaattttcactaa

SEQ ID NO: 1968 - protein, 17 aa, Arabidopsis thaliana
KKKERDSLKYGLVHNFH

SEQ ID NO: 1969 - DNA, 87 bp, Arabidopsis thaliana
  source 1..87: mol_type = genomic DNA
tgaaaaataaattcgacttcatctcccaaacagtttctgtcgatctctttggtgctcgagagagtgctttctggcaaaatgacatag

SEQ ID NO: 1970 - protein, 27 aa, Arabidopsis thaliana
KINSTSSPKQFLSISLVLERVLSGKMT

SEQ ID NO: 1971 - DNA, 75 bp, Arabidopsis thaliana
  source 1..75: mol_type = genomic DNA
taaattcgacttcatctcccaaacagtttctgtcgatctctttggtgctcgagagagtgctttctggcaaaatga

SEQ ID NO: 1972 - protein, 23 aa, Arabidopsis thaliana
IRLHLPNSFCRSLWCSRECFLAK

SEQ ID NO: 1973 - DNA, 225 bp, Arabidopsis thaliana
  source 1..225: mol_type = genomic DNA
tgaatgaaaccaaagatttggaatttttctttgtatagtttttccacgaatcggagtatcacacacggagtgtcccgtgttcttgagcacaaacaaagtagcagaacaaagcatatacaaaagcttcattgcctcgagattaaacagcatcaagacaacatccaaaaattacccaggtttttgtgtttgaaactcgaagattgttgcggattcctgaaagattaa

SEQ ID NO: 1974 - protein, 73 aa, Arabidopsis thaliana
MKPKIWNFSLYSFSTNRSITHGVSRVLEHKQSSRTKHIQKLHCLEIKQHQDNIQKLPRFLCLKLEDCCGFLKD

SEQ ID NO: 1975 - DNA, 51 bp, Arabidopsis thaliana
  source 1..51: mol_type = genomic DNA
tagtttttccacgaatcggagtatcacacacggagtgtcccgtgttcttga

SEQ ID NO: 1976 - protein, 15 aa, Arabidopsis thaliana
FFHESEYHTRSVPCS

SEQ ID NO: 1977 - DNA, 69 bp, Arabidopsis thaliana
  source 1..69: mol_type = genomic DNA
taaatccatttaaagactagagatggatttggatccaaagaagtttgctgcactattggacaaaattga

SEQ ID NO: 1978 - protein, 21 aa, Arabidopsis thaliana
IHLKTRDGFGSKEVCCTIGQN

SEQ ID NO: 1979 - DNA, 78 bp, Arabidopsis thaliana
  source 1..78: mol_type = genomic DNA
tagagatggatttggatccaaagaagtttgctgcactattggacaaaattgaagctgaagctgatgagtttctattag

SEQ ID NO: 1980 - protein, 24 aa, Arabidopsis thaliana
RWIWIQRSLLHYWTKLKLKLMSFY

SEQ ID NO: 1981 - DNA, 63 bp, Arabidopsis thaliana
  source 1..63: mol_type = genomic DNA
tgagtgttgttgttcttaaatgggtctcctaggttcttgagttttcttctgtttatagcctag

SEQ ID NO: 1982 - protein, 19 aa, Arabidopsis thaliana
VLLFLNGSPRFLSFLLFIA

SEQ ID NO: 1983 - DNA, 114 bp, Arabidopsis thaliana
  source 1..114: mol_type = genomic DNA
taactccgttttcctattcgatttcttatctctttctaccatccaacgtgttcttcatacattacttcaattgctctcgatttcgcctcaaaatctgatcctctagtagcttga

SEQ ID NO: 1984 - protein, 36 aa, Arabidopsis thaliana
LRFPIRFLISFYHPTCSSYITSIALDFASKSDPLVA

SEQ ID NO: 1985 - DNA, 132 bp, Arabidopsis thaliana
  source 1..132: mol_type = genomic DNA
tagaccaactgcgagattctcatctataactccgttttcctattcgatttcttatctctttctaccatccaacgtgttcttcatacattacttcaattgctctcgatttcgcctcaaaatctgatcctctag

SEQ ID NO: 1986 - protein, 42 aa, Arabidopsis thaliana
TNCEILIYNSVFLFDFLSLSTIQRVLHTLLQLLSISPQNLIL

SEQ ID NO: 1987 - DNA, 240 bp, Arabidopsis thaliana
  source 1..240: mol_type = genomic DNA
tagtgggcaaccaaaaagtcaagaccttttgctttccagttcgaagaatctggcgtgttcaggtggattgattcttgcgatctgacccttctcatgattagtttccgatcttcgaatagaccaactgcgagattctcatctataactccgttttcctattcgatttcttatctctttctaccatccaacgtgttcttcatacattacttcaattgctctcgatttcgcctcaaaatctga

SEQ ID NO: 1988 - protein, 78 aa, Arabidopsis thaliana
WATKKSRPFAFQFEESGVFRWIDSCDLTLLMISFRSSNRPTARFSSITPFSYSISYLFLPSNVFFIHYFNCSRFRLKI

SEQ ID NO: 1989 - DNA, 132 bp, Arabidopsis thaliana; identical to SEQ ID NO: 1985
  source 1..132: mol_type = genomic DNA

SEQ ID NO: 1990 - protein, 42 aa, Arabidopsis thaliana; identical to SEQ ID NO: 1986

SEQ ID NO: 1991 - DNA, 114 bp, Arabidopsis thaliana; identical to SEQ ID NO: 1983
  source 1..114: mol_type = genomic DNA

SEQ ID NO: 1992 - protein, 36 aa, Arabidopsis thaliana; identical to SEQ ID NO: 1984

SEQ ID NO: 1993 - DNA, 144 bp, Arabidopsis thaliana
  source 1..144: mol_type = genomic DNA
tgaagcttcgctgctgggagaaaaaagctcacatgcgtattatctcagtctcagctatatttagaacaacaacacatgtctgaacacattacagttcctatatctgtttcgaattcaaatctcctgtccttttttcatatataa

SEQ ID NO: 1994 - protein, 46 aa, Arabidopsis thaliana
SFAAGRKKLTCVLSQSQLYLEQQHMSEHITVPISVSNSNLLSFFHI

SEQ ID NO: 1995 - DNA, 57 bp, Arabidopsis thaliana
  source 1..57: mol_type = genomic DNA
taagaaaataaaagaatgggatcaaagtggaataaaagaatattagggcgtcggtga

SEQ ID NO: 1996 - protein, 17 aa, Arabidopsis thaliana
ENKRMGSKWNKRILGRR

SEQ ID NO: 1997 - DNA, 150 bp, Arabidopsis thaliana
  source 1..150: mol_type = genomic DNA
tgatttttcggaattgcttttttaagtgtcactcgtggttggtttcatctcttagttcgaggagtgttctatttttggggctttattgattccatcttctcccttgccgtttatgggataaaatcaacatcaatgagggctttcatgtga

SEQ ID NO: 1998 - protein, 48 aa, Arabidopsis thaliana
FFGIAFLSVTRGWFHLLVRGVFYFWGFIDSIFSLAVYGIKSTSMRAFM

SEQ ID NO: 1999 - DNA, 51 bp, Arabidopsis thaliana
  source 1..51: mol_type = genomic DNA
tagctcaaatacgtatctcgccgtctaaatatgtgttccaacttcgcttaa

SEQ ID NO: 2000 - protein, 15 aa, Arabidopsis thaliana
LKYVSRRLNMCSNFA

SEQ ID NO: 2001 - DNA, 294 bp, Arabidopsis thaliana
  source 1..294: mol_type = genomic DNA
taaacactaaaaaaatggcatcatggaagaaaacaatcgcaacaccattcaagaaagcggcaacattcttcaaccaacctcaacaatcaccaaagaagggttgccgtggaagaatggatgcgcaagccagggaagagcacgagaagagaatggttcaagagcttcaaggagaagtcatggcttgtggttacgacgacgtcctcgtcatgtggtctattcttgacaaatctaactcctcaaataacctctcttcttaaccccaaaaccaaacacaaagaaaaaacggtttcatga

SEQ ID NO: 2002 - protein, 96 aa, Arabidopsis thaliana
TLKKWHHGRKQSQHHSRKRQHSSTNLNNHQRRVAVEEWMRKPGKSTRREWFKSFKEKSWLVVTTTSSSCGLFLTNLTPQITSLLNPKTKHKEKTVS

SEQ ID NO: 2003 - DNA, 99 bp, Arabidopsis thaliana
  source 1..99: mol_type = genomic DNA
tagcaaaatctcaaaagacaaaaagatattgatgtctctccaacgacccaatgggaactcgagttcgtcttcttcccacaagaagcacaaaactggtag

SEQ ID NO: 2004 - protein, 31 aa, Arabidopsis thaliana
QNLKRQKDIDVSPTTQWELEFVFFPQEAQNW

SEQ ID NO: 2005 - DNA, 105 bp, Arabidopsis thaliana
  source 1..105: mol_type = genomic DNA
tagactaccgtggaaaccaccggtgacggcgagtctcctggccgcgaacactctcgtttatctcaggccggcgtttatcgatcccgttattcctcacatcagtga

SEQ ID NO: 2006 - protein, 33 aa, Arabidopsis thaliana
TTVETTGDGESPGREHSRLSQAGVYRSRYSSHQ

SEQ ID NO: 2007 - DNA, 117 bp, Arabidopsis thaliana
  source 1..117: mol_type = genomic DNA
tgacggcgagtctcctggccgcgaacactctcgtttatctcaggccggcgtttatcgatcccgttattcctcacatcagtgaggtctggttcaatcctcacctcatcttcaaggtaa

SEQ ID NO: 2008 - protein, 37 aa, Arabidopsis thaliana
RRVSWPRTLSFISGRRLSIPLFLTSVRSGSILTSSSR

SEQ ID NO: 2009 - DNA, 120 bp, Arabidopsis thaliana
  source 1..120: mol_type = genomic DNA
taattcagtgacacaatctcccacatcttcaaaccctttgaaaccagcgattacagagatgcaagatcctcatgtcccatcttctccaactatctcctccgtctcttcctccgatcttga

SEQ ID NO: 2010 - protein, 38 aa, Arabidopsis thaliana
FSDTISHIFKPFETSDYRDARSSCPIFSNYLLRLFLRS

SEQ ID NO: 2011 - DNA, 132 bp, Arabidopsis thaliana
  source 1..132: mol_type = genomic DNA
tgacgacgacttgtttgggaagtgggtatttgctctataaactatacaatgcccatactcgtaagctcgctgatttggaacgagagcttgctaatgagcgtgaaaacgacgagatcatcaaaacccagttga

SEQ ID NO: 2012 - protein, 42 aa, Arabidopsis thaliana
RRLVWEVGICSINYTMPILVSSLIWNESLLMSVKTTRSSKPS

SEQ ID NO: 2013 - DNA, 57 bp, Arabidopsis thaliana
  source 1..57: mol_type = genomic DNA
taaagatccgttacctctctatgcgagagaagctgtgagagagtttccgacaagtaa

SEQ ID NO: 2014 - protein, 17 aa, Arabidopsis thaliana
RSVTSLCERSCERVSDK

SEQ ID NO: 2015 - DNA, 54 bp, Arabidopsis thaliana
  source 1..54: mol_type = genomic DNA
tagtatattctcacggatgattcagcgagacctgtttcatcgattagcagatga

SEQ ID NO: 2016 - protein, 16 aa, Arabidopsis thaliana
YILTDDSARPVSSISR

SEQ ID NO: 2017 - DNA, 102 bp, Arabidopsis thaliana
  source 1..102: mol_type = genomic DNA
tagaatgaacgaattagtattacttatctgataatgacgataactaacttgcttgatttccagatattcctcatggttttgattcaatttcgtctcccatag

SEQ ID NO: 2018 - protein, 32 aa, Arabidopsis thaliana
NERISITYLIMTITNLLDFQIFLMVLIQFRLP

SEQ ID NO: 2019 - DNA, 54 bp, Arabidopsis thaliana
  source 1..54: mol_type = genomic DNA
tgactcatgacactcatccttcaacaagatcttgtagcagtaacagctctttga

SEQ ID NO: 2020 - protein, 16 aa, Arabidopsis thaliana
LMTLILQQDLVAVTAL

SEQ ID NO: 2021 - DNA, 81 bp, Arabidopsis thaliana
  source 1..81: mol_type = genomic DNA
tgaatcggctctcaacaattgactcatgacactcatccttcaacaagatcttgtagcagtaacagctctttgagactttga

SEQ ID NO: 2022 - protein, 25 aa, Arabidopsis thaliana
IGSQQLTHDTHPSTRSCSSNSSLRL

SEQ ID NO: 2023 - DNA, 180 bp, Arabidopsis thaliana
  source 1..180: mol_type = genomic DNA
taaaccctaaaatggccaaatggagacttgcgactgcgacgctccgtcgacaacttcaatcctcatcgccaactatctctaccttcaagaatccaaccaaagcattgtctgcggcggctcatcagtctactcgcagctacagtacaactcagaccgatgattcgagagggaaatggttaa

SEQ ID NO: 2024 - protein, 58 aa, Arabidopsis thaliana
TLKWPNGDLRLRRSVDNFNPHRQLSLPSRIQPKHCLRRLISLLAATVQLRPMIREGNG

SEQ ID NO: 2025 - DNA, 60 bp, Arabidopsis thaliana
  source 1..60: mol_type = genomic DNA
tagaaaggaatcgtttgcgatgaaatggagccttatagggttattctgatcggtggttga

SEQ ID NO: 2026 - protein, 18 aa, Arabidopsis thaliana
KGIVCDEMEPYRVILIGG

SEQ ID NO: 2027 - DNA, 63 bp, Arabidopsis thaliana
  source 1..63: mol_type = genomic DNA
tagggttattctgatcggtggttgaagcgttgtcatttgcatttcgtgtcattctggttatag

SEQ ID NO: 2028 - protein, 19 aa, Arabidopsis thaliana
GYSDRWLKRCHLHFVSFWL

SEQ ID NO: 2029 - DNA, 111 bp, Arabidopsis thaliana
  source 1..111: mol_type = genomic DNA
taatttaggaagaccgcagatttctttagtattgagaatgagattctccgagaagatggattagtgaatcgagaggttgatatcgttaaatgcggggattttgcaatctag

SEQ ID NO: 2030 - protein, 35 aa, Arabidopsis thaliana
FRKTADFFSIENEILREDGLVNREVDIVKCGDFAI

SEQ ID NO: 2031 - DNA, 93 bp, Arabidopsis thaliana
  source 1..93: mol_type = genomic DNA
tagaaacatttctccttctttaatctcctcctcctcctgtctttgtctttcgattttgttttgcttttatttgggtttctctttctttcttaa

SEQ ID NO: 2032 - protein, 29 aa, Arabidopsis thaliana
KHFSFFNLLLLLSLSFDFVLLLFGFLFLS

SEQ ID NO: 2033 - DNA, 153 bp, Arabidopsis thaliana
  source 1..153: mol_type = genomic DNA
tgaattgagacattattatactttgctttctctctctctctcttgcaagtggttagaaacatttctccttctttaatctcctcctcctcctgtctttgtctttcgattttgttttgcttttatttgggtttctctttctttcttaaattttga

SEQ ID NO: 2034 - protein, 49 aa, Arabidopsis thaliana
IETLLYFAFSLSLLQVVRNISPSLISSSSCLCLSILFCFYLGFSFFLKF

SEQ ID NO: 2035 - DNA, 69 bp, Arabidopsis thaliana
  source 1..69: mol_type = genomic DNA
taaaccctaaagctgagatttttcttgctcagtattgggtcgatgacgatgaagtgtgtgttttgttga

SEQ ID NO: 2036 - protein, 21 aa, Arabidopsis thaliana
TLKLRFFLLSIGSMTMKCVFC

SEQ ID NO: 2037 - DNA, 141 bp, Arabidopsis thaliana
  source 1..141: mol_type = genomic DNA
taaaatcccgataatagaatcatgaaattgtttccgtttatgggtgttttaattgcgtctaatcggaatctcttgccgttatcgtctgcttatcagggtaatcaaagaggcactactgatttcatggatcattgtgattga

SEQ ID NO: 2038 - protein, 45 aa, Arabidopsis thaliana
NPDNRIMKLFPFMGVLIASNRNLLPLSSAYQGNQRGTTDFMDHCD

SEQ ID NO: 2039 - DNA, 213 bp, Arabidopsis thaliana
  source 1..213: mol_type = genomic DNA
taaaatatctcccaccacataccacttaacccgacccgacccgaccggaaaacccgacccgatccatcccaatgtcaggagctaccaccgcttcctccggagaccacaacaacctccgtctcccaactccgacgcttgacgccgaatcgcaaactctgctgcaatcgatttctgctgaagggggttacgcttatgctcgcatggcggtgttag

SEQ ID NO: 2040 - protein, 69 aa, Arabidopsis thaliana
NISHHIPLNPTRPDRKTRPDPSQCQELPPLPPETTTTSVSQLRRLTPNRKLCCNRFLLKGVTLMLAWRC

SEQ ID NO: 2041 - DNA, 54 bp, Arabidopsis thaliana
  source 1..54: mol_type = genomic DNA
tagaagcgaaaaccatggattagggtttttcagtttcctctttcaatcgattaa

SEQ ID NO: 2042 - protein, 16 aa, Arabidopsis thaliana
KRKPWIRVFQFPLSID

SEQ ID NO: 2043 - DNA, 102 bp, Arabidopsis thaliana
  source 1..102: mol_type = genomic DNA
tagaattatttgtttagagatcgacgagaaatgccgtctaatttcgtttcaatcattctaacgaaaaaagtagatgtggacttcattcaatacatcgtttag

SEQ ID NO: 2044 - protein, 32 aa, Arabidopsis thaliana
NYLFRDRREMPSNFVSIILTKKVDVDFIQYIV

SEQ ID NO: 2045 - DNA, 69 bp, Arabidopsis thaliana
  source 1..69: mol_type = genomic DNA
taatttcgtttcaatcattctaacgaaaaaagtagatgtggacttcattcaatacatcgtttagcttag

SEQ ID NO: 2046 - protein, 21 aa, Arabidopsis thaliana
FRFNHSNEKSRCGLHSIHRLA

SEQ ID NO: 2047 - DNA, 57 bp, Arabidopsis thaliana
  source 1..57: mol_type = genomic DNA
taaaaaacaacggcctctctgctactgattgatagaaaacaaaaatctcaaacctag

SEQ ID NO: 2048 - protein, 17 aa, Arabidopsis thaliana
KTTASLLLIDRKQKSQT

SEQ ID NO: 2049 - DNA, 54 bp, Arabidopsis thaliana
  source 1..54: mol_type = genomic DNA
tgaacgaatccgacagctgaacgaattgcgtgtctgagaagatccaaatcctaa

SEQ ID NO: 2050 - protein, 16 aa, Arabidopsis thaliana
TNPTAERIACLRRSKS

SEQ ID NO: 2051 - DNA, 78 bp, Arabidopsis thaliana
  source 1..78: mol_type = genomic DNA
tgaaatcaaatctctctctctttttcttccgtggccaaaatggatccaagcagcttctctttggccatctcttcttga

SEQ ID NO: 2052 - protein, 24 aa, Arabidopsis thaliana
NQISLSFSSVAKMDPSSFSLAISS

SEQ ID NO: 2053 - DNA, 195 bp, Arabidopsis thaliana
  source 1..195: mol_type = genomic DNA
taagaaatgggatggctccattctttcttctctcctttgaagaaactatggtttagcgtcaattctgctcaaaagaagagaagagggatatacatattatacgaggacgtgaagtcatgcccatacgaagatgtgcatgttttgtggtctatacttgtggagtctcacccacacactttgcaaatcaaacaatga

SEQ ID NO: 2054 - protein, 63 aa, Arabidopsis thaliana
EMGWLHSFFSPLKKLWFSVNSAQKKRRGIYILYEDVKSCPYEDVHVLWSILVESHPHTLQIKQ

SEQ ID NO: 2055 - DNA, 120 bp, Arabidopsis thaliana
  source 1..120: mol_type = genomic DNA
tagtgctctctgttttcttctgcttatgaaaaaacttcatggcgaattttgaggatatggaagagaatcagtggggatgttttgttttcttttctctttctcagttcatcgaaactataa

SEQ ID NO: 2056 - protein, 38 aa, Arabidopsis thaliana
CSLFSSAYEKTSWRILRIWKRISGDVLFSFLFLSSSKL

SEQ ID NO: 2057 - DNA, 78 bp, Arabidopsis thaliana
  source 1..78: mol_type = genomic DNA
taaacggatcaatttctttcttttgtttgtttcttcttcttttctccaatctctagtgtaacgtttcatgtcacttga

SEQ ID NO: 2058 - protein, 24 aa, Arabidopsis thaliana
TDQFLSFVCFFFFSPISSVTFHVT

SEQ ID NO: 2059 - DNA, 108 bp, Arabidopsis thaliana
  source 1..108: mol_type = genomic DNA
taagtatatcttgtttacgataatatagaaaaaaattattggtgtttttgtgtgtttataatttatcttgggtcaatgataatagtggacgacgagtcggtgtcttag

SEQ ID NO: 2060 - protein, 34 aa, Arabidopsis thaliana
VYLVYDNIEKNYWCFCVFIIYLGSMIIVDDESVS

SEQ ID NO: 2061 - DNA, 57 bp, Arabidopsis thaliana
  source 1..57: mol_type = genomic DNA
tagaatctggaatgtcagaagaacgtgtgcaggaacaagaacttggggttggtgtaa

SEQ ID NO: 2062 - protein, 17 aa, Arabidopsis thaliana
NLECQKNVCRNKNLGLV

SEQ ID NO: 2063 - DNA, 87 bp, Arabidopsis thaliana
  source 1..87: mol_type = genomic DNA
taacatattttgctaaattctctaaaaacaaatttgataatgatgaaaattttgattagttctgtgttgtgtttggtgattgcttga

SEQ ID NO: 2064 - protein, 27 aa, Arabidopsis thaliana
HILLNSLKTNLIMMKILISSVLCLVIA

SEQ ID NO: 2065 - DNA, 108 bp, Arabidopsis thaliana
  source 1..108: mol_type = genomic DNA
tgaacatcgtcggacctgaaaaatccttctcctagactttttttttttctttcttctctttgtattattattctttgcttcgtttttgtgaagaagatgatccgctga

SEQ ID NO: 2066 - protein, 34 aa, Arabidopsis thaliana
TSSDLKNPSPRLFFFLSSLCIIILCFVFVKKMIR

SEQ ID NO: 2067 - DNA, 120 bp, Arabidopsis thaliana
  source 1..120: mol_type = genomic DNA
tgaaattctccggcgatgaatctcgccgggaaaaggaatattccggttattatttctgtttccgttactagtgactcttaccatcgccgtcatgtcttccgtgaacatcgtcggacctga

SEQ ID NO: 2068 - protein, 38 aa, Arabidopsis thaliana
NSPAMNLAGKRNIPVIISVSVTSDSYHRRHVFREHRRT

SEQ ID NO: 2069 - DNA, 108 bp, Arabidopsis thaliana; identical to SEQ ID NO: 2065
  source 1..108: mol_type = genomic DNA

SEQ ID NO: 2070 - protein, 34 aa, Arabidopsis thaliana; identical to SEQ ID NO: 2066

SEQ ID NO: 2071 - DNA, 138 bp, Arabidopsis thaliana
  source 1..138: mol_type = genomic DNA
taaagcttccctcatcaaaacccatcttcttcttcttcttcttcttcaccacttttactttctccttctccaatccctcaaaaagctcacatcaatggtacatcttctttttcaagtaccgcccataatccccaatga

SEQ ID NO: 2072 - protein, 44 aa, Arabidopsis thaliana
SFPHQNPSSSSSSSSPLLLSPSPIPQKAHINGTSSFSSTAHNPQ

SEQ ID NO: 2073 - DNA, 66 bp, Arabidopsis thaliana
  source 1..66: mol_type = genomic DNA
taatccccaatgattaaacccttttcatttcttcattcctcgagaaagttaaatgtcataatctaa

SEQ ID NO: 2074 - protein, 20 aa, Arabidopsis thaliana
SPMIKPFSFLHSSRKLNVII

SEQ ID NO: 2075 - DNA, 66 bp, Arabidopsis thaliana
  source 1..66: mol_type = genomic DNA
tgagtttttgaagtcggtgcctatgtggttgaagattcgtgggattccgattcagtatctttgtga

SEQ ID NO: 2076 - protein, 20 aa, Arabidopsis thaliana
VFEVGAYVVEDSWDSDSVSL

SEQ ID NO: 2077 - DNA, 378 bp, Arabidopsis thaliana
  source 1..378: mol_type = genomic DNA
tgaatttcaccggcgacgatggctttgaacaatccgcgaagaacacggagatatctcgctttaggtttagccgatgaaccaatcgccgtaccagaaaccgtttacgctcaagtccgtgagaaaaaacgtcaaagcttggtttgtcgagttcttagccctagaagacaagatctctactctgtgatcgataaactccgtcttgagtggtgtctcggaggatatgaatgtcatggacgcattatcggcggcgggaagtgtcagttcgtgtttgagaaagagcgggatttagaaatggttctttggttggtccttacacgtttgatggatggctcgttgtgttgcagaaatgggaagatgagcaaggtcctgagtttttga

SEQ ID NO: 2078 - protein, 124 aa, Arabidopsis thaliana
ISPATMALNNPRRTRRYLALGLADEPIAVPETVYAQVREKKRQSLVCRVLSPRRQDLYSVIDKLRLEWCLGGYECHGRIIGGGKCQFVFEKERDLEMVLWLVLTRLMDGSLCCRNGKMSKVLSF

SEQ ID NO: 2079 - DNA, 84 bp, Arabidopsis thaliana
  source 1..84: mol_type = genomic DNA
tgaaaatgcaaatccctaaccctagacacggccatggtttataaacctcatcaatttcttctacttatctcttctcaaagctaa

SEQ ID NO: 2080 - protein, 26 aa, Arabidopsis thaliana
KCKSLTLDTAMVYKPHQFLLLISSQS

SEQ ID NO: 2081 - DNA, 171 bp, Arabidopsis thaliana
  source 1..171: mol_type = genomic DNA
tgagaaatggagactaaaggtggtaaaaagaagtctagtaatagtagtagtagggacagtcttttcttcgaagctcctcttcgttacagcattgaagacgttagaccaaacggtggaatcaagaaattcagatctgctgcttactcaaacatcactggaaaaccatcctga

SEQ ID NO: 2082 - protein, 55 aa, Arabidopsis thaliana
EMETKGGKKKSSNSSSRDSLFFEAPLRYSIEDVRPNGGIKKFRSAAYSNITGKPS

SEQ ID NO: 2083 - DNA, 96 bp, Arabidopsis thaliana
  source 1..96: mol_type = genomic DNA
tagaccaaacggtggaatcaagaaattcagatctgctgcttactcaaacatcactggaaaaccatcctgatattcctcaatacgttttcttcttaa

SEQ ID NO: 2084 - protein, 30 aa, Arabidopsis thaliana
TKRWNQEIQICCLLKHHWKTILIFLNTFSS

SEQ ID NO: 2085 - DNA, 54 bp, Arabidopsis thaliana
  source 1..54: mol_type = genomic DNA
taagcaacaataaccaatagctctctctctctctctctctctctcctctgctga

SEQ ID NO: 2086 - protein, 16 aa, Arabidopsis thaliana
ATITNSSLSLSLSLLC

SEQ ID NO: 2087 - DNA, 90 bp, Arabidopsis thaliana
  source 1..90: mol_type = genomic DNA
taaccaatagctctctctctctctctctctctctcctctgctgattcttcgctgactcttgcctcctcgacgtcgtcttcggctttgtag

SEQ ID NO: 2088 - protein, 28 aa, Arabidopsis thaliana
PIALSLSLSLSSADSSLTLASSTSSSAL

SEQ ID NO: 2089 - DNA, 81 bp, Arabidopsis thaliana
  source 1..81: mol_type = genomic DNA
taagcttcactacactttctcactctttcaaaaatcctctcatctatcaaaatccgagcaaaaaaaaaagataaagtttga

SEQ ID NO: 2090 - protein, 25 aa, Arabidopsis thaliana
ASLHFLTLSKILSSIKIRAKKKDKV

SEQ ID NO: 2091 - DNA, 234 bp, Arabidopsis thaliana
  source 1..234: mol_type = genomic DNA
taaaatatgttaggatttagtctgttctttaatttcttctattatctttctatttcttacccatctctctctttcaagattccatggaagatcttaacgcatttgcagctgattgcgttgttgtatcatgttgttgcaactgtcttgtgctccagatcgcaatcttcatcttccttggacttcctcaaaagcttgtcaagaacacaagaaagtgttacacaaaatgggggataa

SEQ ID NO: 2092 - protein, 76 aa, Arabidopsis thaliana
NMLGFSLFFNFFYYLSISYPSLSFKIPWKILTHLQLIALLYHVVATVLCSRSQSSSSLDFLKSLSRTQESVTQNGG

SEQ ID NO: 2093 - DNA, 393 bp, Arabidopsis thaliana
  source 1..393: mol_type = genomic DNA
taatttcgattacgacgatactctctgatggcgaacgataagcagatcgaatctcaccaccgcaagcatcaccgttcatcttcgtcgtccgatgacactgaaaaagcatcgaaacgacacaagcatcgtcatcacaagcatcatcaccacaggcatcgccatcaccgagataagaagcgcgaaaatgaaattccatccgccggcgatgagacagagatattggatgttactccggcggctccaattgttgttagtaacggctgtgaggaggaggatgtggaggaaggagagattttagaagaagatgggattggtgatgttttgatgaagacggcagattccgacggcgaatcaggcgaaatcaaatttgaagataataatctgataacctga

SEQ ID NO: 2094 - protein, 129 aa, Arabidopsis thaliana
FRLRRYSLMANDKQIESHHRKHHRSSSSSDDTEKASKRHKHRHHKHHHHRHRHHRDKKRENEIPSAGDETEILDVTPAAPIVVSNGCEEEDVEEGEILEEDGIGDVLMKTADSDGESGEIKFEDNNLIT

SEQ ID NO: 2095 - DNA, 57 bp, Arabidopsis thaliana
  source 1..57: mol_type = genomic DNA
tgatgttttgatgaagacggcagattccgacggcgaatcaggcgaaatcaaatttga

SEQ ID NO: 2096 - protein, 17 aa, Arabidopsis thaliana
CFDEDGRFRRRIRRNQI

SEQ ID NO: 2097 - DNA, 60 bp, Arabidopsis thaliana
  source 1..60: mol_type = genomic DNA
tgaagacggcagattccgacggcgaatcaggcgaaatcaaatttgaagataataatctga

SEQ ID NO: 2098 - protein, 18 aa, Arabidopsis thaliana
RRQIPTANQAKSNLKIII

SEQ ID NO: 2099 - DNA, 198 bp, Arabidopsis thaliana
  source 1..198: mol_type = genomic DNA
tgattgaatcaaaaacttcgtttgattacaattcgatttcccccacacaaaaaaagagatcttgttttaatttcgcggcgagggttcggtttggctttcccgttgatcgcgttgttcttcttcttctttggtgattcaatttcttcaattcaatcaaattcgtatctttcttcttctttgataatgtttaggatttag

SEQ ID NO: 2100 - protein, 64 aa, Arabidopsis thaliana
LNQKLRLITIRFPPHKKRDLVLISRRGFGLAFPLIALFFFFFGDSISSIQSNSYLSSSLIMFRI

SEQ ID NO: 2101 - DNA, 60 bp, Arabidopsis thaliana
  source 1..60: mol_type = genomic DNA
tgattcaatttcttcaattcaatcaaattcgtatctttcttcttctttgataatgtttag

SEQ ID NO: 2102 - protein, 18 aa, Arabidopsis thaliana
FNFFNSIKFVSFFFFDNV

SEQ ID NO: 2103 - DNA, 174 bp, Arabidopsis thaliana
  source 1..174: mol_type = genomic DNA
tgaaactcttcatttgttttatattggaaacagagtctctcttatgaatcaaagcgacaaactttgagaaggcaggcgaaaatctcggatgggttccatcgctctgcaatcttggagcagaggagcttcaacttctcttcatctcctttttcgtccagttggctcgaaccctaa

SEQ ID NO: 2104 - protein, 56 aa, Arabidopsis thaliana
NSSFVLYWKQSLSYESKRQTLRRQAKISDGFHRSAILEQRSFNFSSSPFSSSWLEP

SEQ ID NO: 2105 - DNA, 159 bp, Arabidopsis thaliana
  source 1..159: mol_type = genomic DNA
tgaatcaaagcgacaaactttgagaaggcaggcgaaaatctcggatgggttccatcgctctgcaatcttggagcagaggagcttcaacttctcttcatctcctttttcgtccagttggctcgaaccctaagctatatgatgctcgaagagtacaagtaa

SEQ ID NO: 2106 - protein, 51 aa, Arabidopsis thaliana
IKATNFEKAGENLGWVPSLCNLGAEELQLLFISFFVQLARTLSYMMLEEYK

SEQ ID NO: 2107 - DNA, 63 bp, Arabidopsis thaliana
  source 1..63: mol_type = genomic DNA
tagattctgatgttcgaattcttgttgttgatgatgattgaattgatgatgatgatggtttga

SEQ ID NO: 2108 - protein, 19 aa, Arabidopsis thaliana
ILMFEFLLLMMIELMMMMV

SEQ ID NO: 2109 - DNA, 63 bp, Arabidopsis thaliana; identical to SEQ ID NO: 2107
  source 1..63: mol_type = genomic DNA

SEQ ID NO: 2110 - protein, 19 aa, Arabidopsis thaliana
ILMFEFLLLMMIELMMMMV

SEQ ID NO: 2111 - DNA, 255 bp, Arabidopsis thaliana
  source 1..255: mol_type = genomic DNA
taagaaaacgaaaacaatgtcgattcttctgtacttcatcgctcttttatcgttaataatcataaagaaaatcaaagactcgaaccgaaatcttcctccgagcccactgaagctaccggttatcggaaacctataccagcttcgaggattgtttcacaaatgtcttcacgatctctccaagaaacacggacccgtgttgcttctccgtctaggttttctcgatatggttgtgatctcatcgaccgaagcagctga

SEQ ID NO: 2112 - protein, 83 aa, Arabidopsis thaliana
ENENNVDSSVLHRSFIVNNHKENQRLEPKSSSEPTEATGYRKPIPASRIVSQMSSRSLQETRTRVASPSRFSRYGCDLIDRSS

SEQ ID NO: 2113 - DNA, 780 bp, Arabidopsis thaliana
  source 1..780: mol_type = genomic DNA
tagggttccgtctcaaattacgagcagatctcgtactctctgatgtctgaagatccggagtaccgttgcttcattggtgggcttgcttggacaacgtctgatcgtggtctcagagatgcctttgagaagtatggtcacctcgttgaggccaaggtggttcttgacaagttttctggtcgctcccgtggttttggattcatcactttcgatgagaaaaaagctatggatgaagctattgcagcaatgaatggaatggatttggatgggcgaactatcactgttgataaagctcagcctcatcagggtggtgcaggcagagataatgatggtgaccgtggtcgagaccgtggatatgatcgtgatcgcagtcgtccctctggtgggcgaggtggtggagattgctttaaatgtggcaagcctggacattttgcaagagagtgtccttctgaaagtagtagagatggtggtggaaggttcagctcaaaggatgataggtacagttcgaaggacgataggtatggtgcaaaagatgataggtatggtgcaaaggaggataggtatggtgcaaaggatgataggtacagctccaaggatgataggtacagctccaaggatgataggtatggtagtagggatggtggaggtagtcgctatggacctgatcgcagtggtgaacgcgctggaggacgcagccgggatggtggcagccgtggagctccaggaggtgagaggcacagtcgtgctccatatgaccgccccagagctggtggtttccactag

SEQ ID NO: 2114 - protein, 258 aa, Arabidopsis thaliana
GSVSNYEQISYSLMSEDPEYRCFIGGLAWTTSDRGLRDAFEKYGHLVEAKVVLDKFSGRSRGFGFITFDEKKAMDEAIAAMNGMDLDGRTITVDKAQPHQGGAGRDNDGDRGRDRGYDRDRSRPSGGRGGGDCFKCGKPGHFARECPSESSRDGGGRFSSKDDRYSSKDDRYGAKDDRYGAKEDRYGAKDDRYSSKDDRYSSKDDRYGSRDGGGSRYGPDRSGERAGGRSRDGGSRGAPGGERHSRAPYDRPRAGGFH

SEQ ID NO: 2115 - DNA, 51 bp, Arabidopsis thaliana
  source 1..51: mol_type = genomic DNA
tgaccgccccagagctggtggtttccactagaattctactccaaaggttaa

SEQ ID NO: 2116 - protein, 15 aa, Arabidopsis thaliana
PPQSWWFPLEFYSKG

SEQ ID NO: 2117 - DNA, 54 bp, Arabidopsis thaliana
  source 1..54: mol_type = genomic DNA
taaggaaaatcaaattctcagacaacttttttcgaagaagacgacgaattttaa

SEQ ID NO: 2118 - protein, 16 aa, Arabidopsis thaliana
GKSNSQTTFFEEDDEF

SEQ ID NO: 2119 - DNA, 51 bp, Arabidopsis thaliana
  source 1..51: mol_type = genomic DNA
tagataaagacacgacttttacaaagcttaggacctgcattctcaccgtaa

SEQ ID NO: 2120 - protein, 15 aa, Arabidopsis thaliana
IKTRLLQSLGPAFSP

SEQ ID NO: 2121 - DNA, 87 bp, Arabidopsis thaliana
  source 1..87: mol_type = genomic DNA
tgaatctatcattctctctctctatctctatcttccttttcagatttcgcttcttcaattcatgaaatcctcgtgattctactttaa

SEQ ID NO: 2122 - protein, 27 aa, Arabidopsis thaliana
IYHSLSLSLSSFSDFASSIHEILVILL

SEQ ID NO: 2123 - DNA, 63 bp, Arabidopsis thaliana
  source 1..63: mol_type = genomic DNA
taagccaaaattaagcagaaaaatggagaaatagtgacggtgagagagagagagatacggtaa

SEQ ID NO: 2124 - protein, 19 aa, Arabidopsis thaliana
AKIKQKNGEIVTVREREIR

SEQ ID NO: 2125 - DNA, 195 bp, Arabidopsis thaliana
  source 1..195: mol_type = genomic DNA
taagagtttcatgattgcatcggtgttgaaagggtaactgcaatgaactctgtatctgtcacccttgcatttcatgtaacttcagactgttctgccgtaaaccaatgtcggataaatgttaagtgtttggtttcttgtatgcgggtcagtaagcaagcaatgcacgagttgtggatgcctgtgactgatacataa

SEQ ID NO: 2126 - protein, 63 aa, Arabidopsis thaliana
EFHDCIGVERVTAMNSVSVTLAFHVTSDCSAVNQCRINVKCLVSCMRVSKQAMHELWMPVTDT

SEQ ID NO: 2127 - DNA, 72 bp, Arabidopsis thaliana
  source 1..72: mol_type = genomic DNA
taaatgttaagtgtttggtttcttgtatgcgggtcagtaagcaagcaatgcacgagttgtggatgcctgtga

SEQ ID NO: 2128 - protein, 22 aa, Arabidopsis thaliana
MLSVWFLVCGSVSKQCTSCGCL

SEQ ID NO: 2129 - DNA, 93 bp, Arabidopsis thaliana
  source 1..93: mol_type = genomic DNA
tgactgatacataattctagatttttatttattgttctgttagagatagagttagtcagtattgtttattttcaaggatttggtagtttctag

SEQ ID NO: 2130 - protein, 29 aa, Arabidopsis thaliana
LIHNSRFLFIVLLEIELVSIVYFQGFGSF

SEQ ID NO: 2131 - DNA, 324 bp, Arabidopsis thaliana
  source 1..324: mol_type = genomic DNA
tgaagattcttcttctcttaccttttggattcgtctcttcttcttgattttgagtttgattctaattttggatccagagggtttatttatgtgaatgattccgattttggggaacttgttcgtctgaaatgttttgttgaaccggttgcgtcatcggaaagggtaactgcaatgaactctgtatctgtcacccttgcatttcatgtaacttcagactgttctgccgtaaaccaatgtcggataaatgttaagtgtttggtttcttgtatgcgggtcagtaagcaagcaatgcacgagttgtggatgcctgtgactgatacataa

SEQ ID NO: 2132 - protein, 106 aa, Arabidopsis thaliana
RFFFSYLLDSSLLLDFEFDSNFGSRGFIYVNDSDFGELVRLKCFVEPVASSERVTAMNSVSVTLAFHVTSDCSAVNQCRINVKCLVSCMRVSKQAMHELWMPVTDT

SEQ ID NO: 2133 - DNA, 72 bp, Arabidopsis thaliana; identical to SEQ ID NO: 2127
  source 1..72: mol_type = genomic DNA

SEQ ID NO: 2134 - protein, 22 aa, Arabidopsis thaliana
MLSVWFLVCGSVSKQCTSCGCL

SEQ ID NO: 2135 - DNA, 207 bp, Arabidopsis thaliana
  source 1..207: mol_type = genomic DNA
tgattaacttctgcactttgtgttctattgatgattaaggaaagggtaactgcaatgaactctgtatctgtcacccttgcatttcatgtaacttcagactgttctgccgtaaaccaatgtcggataaatgttaagtgtttggtttcttgtatgcgggtcagtaagcaagcaatgcacgagttgtggatgcctgtgactgatacataa

SEQ ID NO: 2136 - protein, 67 aa, Arabidopsis thaliana
LTSALCVLLMIKERVTAMNSVSVTLAFHVTSDCSAVNQCRINVKCLVSCMRVSKQAMHELWMPVTDT

SEQ ID NO: 2137 - DNA, 72 bp, Arabidopsis thaliana; identical to SEQ ID NO: 2127
  source 1..72: mol_type = genomic DNA

SEQ ID NO: 2138 - protein, 22 aa, Arabidopsis thaliana
MLSVWFLVCGSVSKQCTSCGCL

SEQ ID NO: 2139 - DNA, 72 bp, Arabidopsis thaliana; identical to SEQ ID NO: 2127
  source 1..72: mol_type = genomic DNA

SEQ ID NO: 2140 - protein, 22 aa, Arabidopsis thaliana
MLSVWFLVCGSVSKQCTSCGCL

SEQ ID NO: 2141 - DNA, 72 bp, Arabidopsis thaliana; identical to SEQ ID NO: 2127
  source 1..72: mol_type = genomic DNA

SEQ ID NO: 2142 - protein, 22 aa, Arabidopsis thaliana
MLSVWFLVCGSVSKQCTSCGCL

SEQ ID NO: 2143 - DNA, 72 bp, Arabidopsis thaliana; identical to SEQ ID NO: 2127
  source 1..72: mol_type = genomic DNA

SEQ ID NO: 2144 - protein, 22 aa, Arabidopsis thaliana
MLSVWFLVCGSVSKQCTSCGCL

SEQ ID NO: 2145 - DNA, 60 bp, Arabidopsis thaliana
  source 1..60: mol_type = genomic DNA
tgaacatatctgacgatacttgaatctcactctttcttctcttctattctctgtttttag

SEQ ID NO: 2146 - protein, 18 aa, Arabidopsis thaliana
TYLTILESHSFFSSILCF

SEQ ID NO: 2147 - DNA, 69 bp, Arabidopsis thaliana
  source 1..69: mol_type = genomic DNA
tgatttattctctatcgaagagctagcgtttggagtgttgcgatgcatctgcgttttgaaggggattga

SEQ ID NO: 2148 - protein, 21 aa, Arabidopsis thaliana
FILYRRASVWSVAMHLRFEGD

SEQ ID NO: 2149 - DNA, 243 bp, Arabidopsis thaliana
  source 1..243: mol_type = genomic DNA
taagaaacttttttctctctctctgagtcttcgacttcgtttttatctccagctttttttttctcacgcgaaaagctcctgttctttaaaggatttgatcacgagagtttcaggtttggatttcgtagtcaatttccagattctagggttttggttggtcaaaatcttctacttcgtcccgtgtttgtggattggttcacggatctttggagattccgaaattggaggcgatttttattctag

SEQ ID NO: 2150 - protein, 79 aa, Arabidopsis thaliana
ETFFSLSESSTSFLSPAFFFSREKLLFFKGFDHESFRFGFRSQFPDSRVLVGQNLLLRPVFVDWFTDLWRFRNWRRFLF

SEQ ID NO: 2151 - DNA, 111 bp, Arabidopsis thaliana
  source 1..111: mol_type = genomic DNA
tagggttttggttggtcaaaatcttctacttcgtcccgtgtttgtggattggttcacggatctttggagattccgaaattggaggcgatttttattctagggtttcggtga

SEQ ID NO: 2152 - protein, 35 aa, Arabidopsis thaliana
GFGWSKSSTSSRVCGLVHGSLEIPKLEAIFILGFR

SEQ ID NO: 2153 - DNA, 69 bp, Arabidopsis thaliana
  source 1..69: mol_type = genomic DNA
taaaacagaatttcttctctaatccattacgccggcgatttcggcggcgtaggagatgaaagttcgtag

SEQ ID NO: 2154 - protein, 21 aa, Arabidopsis thaliana
NRISSLIHYAGDFGGVGDESS

SEQ ID NO: 2155 - DNA, 135 bp, Arabidopsis thaliana
  source 1..135: mol_type = genomic DNA
taatctcacttcttttcaacgacacaacacagaaactattttttcctttcgaattttgaatcccatagacgttacgttgacgagaaatacactctcatcagaaaatcaaaaaaaattctcatcctcagaaaataa

SEQ ID NO: 2156 - protein, 43 aa, Arabidopsis thaliana
SHFFSTTQHRNYFFLSNFESHRRYVDEKYTLIRKSKKILILRK

SEQ ID NO: 2157 - DNA, 63 bp, Arabidopsis thaliana
  source 1..63: mol_type = genomic DNA
tgacgagaaatacactctcatcagaaaatcaaaaaaaattctcatcctcagaaaataaaataa

SEQ ID NO: 2158 - protein, 19 aa, Arabidopsis thaliana
REIHSHQKIKKNSHPQKIK

SEQ ID NO: 2159 - DNA, 810 bp, Arabidopsis thaliana
  source 1..810: mol_type = genomic DNA
tgattttattccaacaataaatttgcattctctccatctctgctaaccgcaacagccatgacttatgtgctagaaggacacgagcatcgtgtatccgacgttaacgaaggttttgaatgcgatgcttgcaatcgatcctacggtgatggctactcatgtggtgaatgcaagtttacgatacacaagaaatgtgtattcgtgttcaacatacaagcgagaatcaaccacccttctcatgatgggcatagtcttgagtttctgacaaccggagctcctgatcacacagacccgaaatgccatctatgcggtaaaaacacgaagcgccttctctatcattgctatgattgtaaagtcaatttggatatcgattgcataattgattccttgtgtgctcgatctgatctgaatatggagtggcaccaccatcccctactgatggttgacttaaaagcttctcttatgtcatgcgacttttgtcatggtactagcaaacatggatattgctgccctcgttgcaggttggtgattcatgagggatgtgtctctgtatttgaatcaccagagattattcacccttctcatgtcagacaccctcttaagcttatctccagtggagctccagattatacggaccgaagttgtgatatatgtggaggcactactgggaacttactatatcattgtgatatatgtaagttcagcttggatctggattgcgcgactgaaggccctccaccagtttctctatcaaatatgaagatccataagcatacactcacacatgccaaaattgatctccttcgtgtgtga

SEQ ID NO: 2160 - protein, 268 aa, Arabidopsis thaliana
FYSNNKFAFSPSLLTATAMTYVLEGHEHRVSDVNEGFECDACNRSYGDGYSCGECKFTIHKKCVFVFNIQARINHPSHDGHSLEFLTTGAPDHTDPKCHLCGKNTKRLLYHCYDCKVNLDIDCIIDSLCARSDLNMEWHHHPLLMVDLKASLMSCDFCHGTSKHGYCCPRCRLVIHEGCVSVFESPEIIHPSHVRHPLKLISSGAPDYTDRSCDICGGTTGNLLYHCDICKFSLDLDCATEGPPPVSLSNMKIHKHTLTHAKIDLLRV

SEQ ID NO: 2161 - DNA, 159 bp, Arabidopsis thaliana
  source 1..159: mol_type = genomic DNA
taagaaacttcaaaaaaaataatcattaaccaaaccaacacgaatcatcaaaattttgaccatttctccatcagttccagtgtcaacttcagttcttcttcccattcttctctcaaattcccatctttgccgttcaatgtttttgttttctttatgtag

SEQ ID NO: 2162 - protein, 51 aa, Arabidopsis thaliana
ETSKKIIINQTNTNHQNFDHFSISSSVNFSSSSHSSLKFPSLPFNVFVFFM

SEQ ID NO: 2163 - DNA, 144 bp, Arabidopsis thaliana
  source 1..144: mol_type = genomic DNA
taatcattaaccaaaccaacacgaatcatcaaaattttgaccatttctccatcagttccagtgtcaacttcagttcttcttcccattcttctctcaaattcccatctttgccgttcaatgtttttgttttctttatgtagttga

SEQ ID NO: 2164 - protein, 46 aa, Arabidopsis thaliana
SLTKPTRIIKILTISPSVPVSTSVLLPILLSNSHLCRSMFLFSLCS

SEQ ID NO: 2165 - DNA, 69 bp, Arabidopsis thaliana
  source 1..69: mol_type = genomic DNA
tgagtatcgtctacaatgggtgatttctttgatgagttatttcgagaaaaaataggcaaaacaaaatga

SEQ ID NO: 2166 - protein, 21 aa, Arabidopsis thaliana
VSSTMGDFFDELFREKIGKTK

SEQ ID NO: 2167 - DNA, 117 bp, Arabidopsis thaliana
  source 1..117: mol_type = genomic DNA
tgagtaaaaaaaagaatgttaagaaagatggagatgagagtgaaagtgggttttggtttagattcaagtttatctttagttgtatctcttctagatcaaaagttgatagttccatga

SEQ ID NO: 2168 - protein, 37 aa, Arabidopsis thaliana
VKKRMLRKMEMRVKVGFGLDSSLSLVVSLLDQKLIVP

SEQ ID NO: 2169 - DNA, 147 bp, Arabidopsis thaliana
  source 1..147: mol_type = genomic DNA
tgatctttggtttctgttcgattttggaggaaaaaaggatcaaactttatattaagagagaattgggtttcgttgatcttcatctttctattgatttcattatctgggtttgatcaaagttttgttttttggtacataaatatgtga

SEQ ID NO: 2170 - protein, 47 aa, Arabidopsis thaliana
SLVSVRFWRKKGSNFILRENWVSLIFIFLLISLSGFDQSFVFWYINM

SEQ ID NO: 2171 - DNA, 114 bp, Arabidopsis thaliana
  source 1..114: mol_type = genomic DNA
tagcaacattcatcaaccagagcagattcactatcatcatcttataacacatcttcttcctctaaagtttattttcttaaacttattacaaaaaacatgatcttcaaaagttga

SEQ ID NO: 2172 - protein, 36 aa, Arabidopsis thaliana
QHSSTRADSLSSSYNTSSSSKVYFLKLITKNMIFKS

SEQ ID NO: 2173 - DNA, 57 bp, Arabidopsis thaliana
  source 1..57: mol_type = genomic DNA
taatcgaaaaatgtcgaagtccgacattaccgaatcaagtctcatccacaaggttga

SEQ ID NO: 2174 - protein, 17 aa, Arabidopsis thaliana
SKNVEVRHYRIKSHPQG

SEQ ID NO: 2175 - DNA, 114 bp, Arabidopsis thaliana
  source 1..114: mol_type = genomic DNA
tagtatgaagtgctactcgaaatctttgccacccgtctcgttccagttcctagccgcaaggtgtcgatgcccatgggcgacactcacacctcgctcacactcgggacagcctag

SEQ ID NO: 2176 - protein, 36 aa, Arabidopsis thaliana
YEVLLEIFATRLVPVPSRKVSMPMGDTHTSLTLGTA

SEQ ID NO: 2177 - DNA, 294 bp, Arabidopsis thaliana
  source 1..294: mol_type = genomic DNA
tgattgatcaaagatgggaagtcagaagaatgtgaaacacctcgaggaatgcactgtttccaatgcattgggaacttgggtattctcagtcctaggcgcattggttgcaatcccggtaggcatcaaacgcaagtctctaggtccacttgtgttcttcggcacaaccggaacaatgctcgacattatcattggtgtgagtcaatgcgagagagaacacgcagaacaccaaacgaagttactccaagactctcaaaatgccacaacaacaacaacaaccaccaacacagagactga

SEQ ID NO: 2178 - protein, 96 aa, Arabidopsis thaliana
LIKDGKSEECETPRGMHCFQCIGNLGILSPRRIGCNPGRHQTQVSRSTCVLRHNRNNARHYHWCESMRERTRRTPNEVTPRLSKCHNNNNNHQHRD

SEQ ID NO: 2179 - DNA, 294 bp, Arabidopsis thaliana; identical to SEQ ID NO: 2177
  source 1..294: mol_type = genomic DNA

SEQ ID NO: 2180 - protein, 96 aa, Arabidopsis thaliana; identical to SEQ ID NO: 2178

SEQ ID NO: 2181 - DNA, 294 bp, Arabidopsis thaliana; identical to SEQ ID NO: 2177
  source 1..294: mol_type = genomic DNA

SEQ ID NO: 2182 - protein, 96 aa, Arabidopsis thaliana; identical to SEQ ID NO: 2178

SEQ ID NO: 2183 - DNA, 54 bp, Arabidopsis thaliana
  source 1..54: mol_type = genomic DNA
tgatcttttgtgatgggcctcttctctctgtttaggtttctctttttccaataa

SEQ ID NO: 2184 - protein, 16 aa, Arabidopsis thaliana
SFVMGLFSLFRFLFFQ

SEQ ID NO: 2185 - DNA, 96 bp, Arabidopsis thaliana
  source 1..96: mol_type = genomic DNA
tgatttcgacaaaatgtggttaatactctcgagcggcgtttgttctatatcccttctttcaaaatcaaccgtgacgtcgccggactatttgattaa

SEQ ID NO: 2186 - protein, 30 aa, Arabidopsis thaliana
FRQNVVNTLERRLFYIPSFKINRDVAGLFD

SEQ ID NO: 2187 - DNA, 123 bp, Arabidopsis thaliana
  source 1..123: mol_type = genomic DNA
taagaagtcgtgaaggctctcttcgagcgatgcgttgaagaaaggcgagtgaccaacaacaatggcgaaaatatctttcctctcttcttattcttcttcttcttatcacgatcctcattataa

SEQ ID NO: 2188 - protein, 39 aa, Arabidopsis thaliana
EVVKALFERCVEERRVTNNNGENIFPLFLFFFFLSRSSL

SEQ ID NO: 2189 - DNA, 81 bp, Arabidopsis thaliana
  source 1..81: mol_type = genomic DNA
tgaccaacaacaatggcgaaaatatctttcctctcttcttattcttcttcttcttatcacgatcctcattataaaccctaa

SEQ ID NO: 2190 - protein, 25 aa, Arabidopsis thaliana
PTTMAKISFLSSYSSSSYHDPHYKP

SEQ ID NO: 2191 - DNA, 123 bp, Arabidopsis thaliana; identical to SEQ ID NO: 2187
  source 1..123: mol_type = genomic DNA

SEQ ID NO: 2192 - protein, 39 aa, Arabidopsis thaliana; identical to SEQ ID NO: 2188

SEQ ID NO: 2193 - DNA, 72 bp, Arabidopsis thaliana
  source 1..72: mol_type = genomic DNA
tgagtttttgttagatttcttccagttggtgaatcgtggtactcatttcttctcatgtgccatggatattga

SEQ ID NO: 2194 - protein, 22 aa, Arabidopsis thaliana
VFVRFLPVGESWYSFLLMCHGY

SEQ ID NO: 2195 - DNA, 135 bp, Arabidopsis thaliana
  source 1..135: mol_type = genomic DNA
tgatttattggggtttactcgaaattgccgttattgggtttcttaaagtcttcgtcttttgatgttcttcatcagttcaaatttacgatttttgtgagggttttggatacaaatgttgatttctatgtggattga

SEQ ID NO: 2196 - protein, 43 aa, Arabidopsis thaliana
FIGVYSKLPLLGFLKSSSFDVLHQFKFTIFVRVLDTNVDFYVD

SEQ ID NO: 2197 - DNA, 60 bp, Arabidopsis thaliana
  source 1..60: mol_type = genomic DNA
tgatgttcttcatcagttcaaatttacgatttttgtgagggttttggatacaaatgttga

SEQ ID NO: 2198 - protein, 18 aa, Arabidopsis thaliana
CSSSVQIYDFCEGFGYKC

SEQ ID NO: 2199 - DNA, 216 bp, Arabidopsis thaliana
  source 1..216: mol_type = genomic DNA
tgatctttaatgtgtatcaattcttgtttgctgacttttgttacattaccctgttttgcagaagcttggagtttatctttgactttattgttggatgttaaagctatcttatcttatagtataaagtggagtttcgacatgttgcgattcagttgtagtggttttgatatctcaagttgttttattcatcttgctgaatggcatcctttggaataa

SEQ ID NO: 2200 - protein, 70 aa, Arabidopsis thaliana
SLMCINSCLLTFVTLPCFAEAWSLSLTLLLDVKAILSYSIKWSFDMLRFSCSGFDISSCFIHLAEWHPLE

SEQ ID NO: 2201 - DNA, 216 bp, Arabidopsis thaliana
  source 1..216: mol_type = genomic DNA
tgagattttcattcttattcatatgagtttttgttagatttcttccagttggtgaatcgtgaagcttggagtttatctttgactttattgttggatgttaaagctatcttatcttatagtataaagtggagtttcgacatgttgcgattcagttgtagtggttttgatatctcaagttgttttattcatcttgctgaatggcatcctttggaataa

SEQ ID NO: 2202 - protein, 70 aa, Arabidopsis thaliana
DFHSYSYEFLLDFFQLVNREAWSLSLTLLLDVKAILSYSIKWSFDMLRFSCSGFDISSCFIHLAEWHPLE

SEQ ID NO: 2203 - DNA, 216 bp, Arabidopsis thaliana; identical to SEQ ID NO: 2201
  source 1..216: mol_type = genomic DNA

SEQ ID NO: 2204 - protein, 70 aa, Arabidopsis thaliana; identical to SEQ ID NO: 2202

SEQ ID NO: 2205 - DNA, 69 bp, Arabidopsis thaliana
  source 1..69: mol_type = genomic DNA
tgatcggtgtgcaattgttcaacggaggatatcatgtcattaccaaagtggctctcaacgttggtgtaa

SEQ ID NO: 2206 - protein, 21 aa, Arabidopsis thaliana
SVCNCSTEDIMSLPKWLSTLV

SEQ ID NO: 2207 - DNA, 120 bp, Arabidopsis thaliana
  source 1..120: mol_type = genomic DNA
tagtcatcttcctcttctcttcatccgttaacgcttgtgatcgatgtctacaccgttctaaagcatcttatttctcctctgcttctgctctctcttgtaaacattcccatcttcttctaa

SEQ ID NO: 2208 - protein, 38 aa, Arabidopsis thaliana
SSSSSLHPLTLVIDVYTVLKHLISPLLLLSLVNIPIFF

SEQ ID NO: 2209 - DNA, 192 bp, Arabidopsis thaliana
  source 1..192: mol_type = genomic DNA
taactactagtttgtttcttttttctcatgtcttgtttatgggtattttctagccggggcttgtgcctatggccctatggctacgagcttctttgccggccacattgcggccgctataccttccatttacaaagatggtgctggctgtggagcttgctttcaagtcagatgcaagaaccccaagttgtgtaa

SEQ ID NO: 2210 - protein, 62 aa, Arabidopsis thaliana
LLVCFFFLMSCLWVFSSRGLCLWPYGYELLCRPHCGRYTFHLQRWCWLWSLLSSQMQEPQVV

SEQ ID NO: 2211 - DNA, 51 bp, Arabidopsis thaliana
  source 1..51: mol_type = genomic DNA
taaaaaaaaaaaatttccatcactttcttgggtaaaaaaaacatgggttag

SEQ ID NO: 2212 - protein, 15 aa, Arabidopsis thaliana
KKKISITFLGKKNMG

SEQ ID NO: 2213 - DNA, 102 bp, Arabidopsis thaliana
  source 1..102: mol_type = genomic DNA
taggtaacgtttgatacaagtaaaaaaaaaaaatttccatcactttcttgggtaaaaaaaacatgggttagaggaaaaactggggaaaagattttagattaa

SEQ ID NO: 2214 - protein, 32 aa, Arabidopsis thaliana
VTFDTSKKKKFPSLSWVKKTWVRGKTGEKILD

SEQ ID NO: 2215 - DNA, 102 bp, Arabidopsis thaliana; identical to SEQ ID NO: 2213
  source 1..102: mol_type = genomic DNA

SEQ ID NO: 2216 - protein, 32 aa, Arabidopsis thaliana; identical to SEQ ID NO: 2214

SEQ ID NO: 2217 - DNA, 51 bp, Arabidopsis thaliana; identical to SEQ ID NO: 2211
  source 1..51: mol_type = genomic DNA

SEQ ID NO: 2218 - protein, 15 aa, Arabidopsis thaliana
KKKISITFLGKKNMG

SEQ ID NO: 2219 - DNA, 102 bp, Arabidopsis thaliana; identical to SEQ ID NO: 2213
  source 1..102: mol_type = genomic DNA

SEQ ID NO: 2220 - protein, 32 aa, Arabidopsis thaliana; identical to SEQ ID NO: 2214

SEQ ID NO: 2221 - DNA, 51 bp, Arabidopsis thaliana; identical to SEQ ID NO: 2211
  source 1..51: mol_type = genomic DNA

SEQ ID NO: 2222 - protein, 15 aa, Arabidopsis thaliana
KKKISITFLGKKNMG

SEQ ID NO: 2223 - DNA, 126 bp, Arabidopsis thaliana
  source 1..126: mol_type = genomic DNA
taggtaaattttgaaattttggatttaatggttgaggaagatagatggtgtttcttcaatggatctgtgaagacgagattgttggagattgatacttatcttattcgtctttatggctttgcttga

SEQ ID NO: 2224 - protein, 40 aa, Arabidopsis thaliana
VNFEILDLMVEEDRWCFFNGSVKTRLLEIDTYLIRLYGFA

SEQ ID NO: 2225 - DNA, 51 bp, Arabidopsis thaliana
  source 1..51: mol_type = genomic DNA
taggagctgccattgtgtgttgaatgggtatcaagttcttcttctaagtga

SEQ ID NO: 2226 - protein, 15 aa, Arabidopsis thaliana
ELPLCVEWVSSSSSK

SEQ ID NO: 2227 - DNA, 51 bp, Arabidopsis thaliana; identical to SEQ ID NO: 2225
  source 1..51: mol_type = genomic DNA

SEQ ID NO: 2228 - protein, 15 aa, Arabidopsis thaliana
ELPLCVEWVSSSSSK

SEQ ID NO: 2229 - DNA, 75 bp, Arabidopsis thaliana
  source 1..75: mol_type = genomic DNA
tagcttaaaggttccagatttcgaaaaagctctctttttttttctccttcgtgttacacaaccatttctaggtaa

SEQ ID NO: 2230 - protein, 23 aa, Arabidopsis thaliana
LKGSRFRKSSLFFSPSCYTTISR

SEQ ID NO: 2231 - DNA, 66 bp, Arabidopsis thaliana
  source 1..66: mol_type = genomic DNA
taaaggttccagatttcgaaaaagctctctttttttttctccttcgtgttacacaaccatttctag

SEQ ID NO: 2232 - protein, 20 aa, Arabidopsis thaliana
RFQISKKLSFFFSFVLHNHF

SEQ ID NO: 2233 - DNA, 66 bp, Arabidopsis thaliana; identical to SEQ ID NO: 2231
  source 1..66: mol_type = genomic DNA

SEQ ID NO: 2234 - protein, 20 aa, Arabidopsis thaliana
RFQISKKLSFFFSFVLHNHF

SEQ ID NO: 2235 - DNA, 84 bp, Arabidopsis thaliana
  source 1..84: mol_type = genomic DNA
tgatgtctgttgtgtaagaattggatacaattaccgaatggaaggctcatagaaggtaaaacaatcttaaccttatatctttga

SEQ ID NO: 2236 - protein, 26 aa, Arabidopsis thaliana
CLLCKNWIQLPNGRLIEGKTILTLYL

SEQ ID NO: 2237 - DNA, 69 bp, Arabidopsis thaliana
  source 1..69: mol_type = genomic DNA
tgatccaacgttttgatcatgaaatcgggagagcaaccacatatactcaatatacaaccgccggaatga

SEQ ID NO: 2238 - protein, 21 aa, Arabidopsis thaliana
SNVLIMKSGEQPHILNIQPPE

SEQ ID NO: 2239 - DNA, 63 bp, Arabidopsis thaliana
  source 1..63: mol_type = genomic DNA
tgaaatcgggagagcaaccacatatactcaatatacaaccgccggaatgatgatcgacgatga

SEQ ID NO: 2240 - protein, 19 aa, Arabidopsis thaliana
NRESNHIYSIYNRRNDDRR

SEQ ID NO: 2241 - DNA, 108 bp, Arabidopsis thaliana
  source 1..108: mol_type = genomic DNA
tgatcgacgatgagattgttcaccaagtcaacttcaaaccggatcttgtggttatattgttcaattctttgtaacaccaggagcttctatcatgtggctatctcatga

SEQ ID NO: 2242 - protein, 34 aa, Arabidopsis thaliana
STMRLFTKSTSNRILWLYCSILCNTRSFYHVAIS

SEQ ID NO: 2243 - DNA, 54 bp, Arabidopsis thaliana
  source 1..54: mol_type = genomic DNA
tgatgttgttcgaaggagaagatgatagaaggctatgcatgggagggtttgtga

SEQ ID NO: 2244 - protein, 16 aa, Arabidopsis thaliana
CCSKEKMIEGYAWEGL

SEQ ID NO: 2245 - DNA, 207 bp, Arabidopsis thaliana
  source 1..207: mol_type = genomic DNA
tagctctgcaactgcaagtttaaccccaaagtcactgccacaaataaagaaagcaaagctaacacgagtccagcgagttttgaatcttccttctatggcatgatttccatttcctcttccgttttccacgggaagacacttcccttctcttctttatcttctctcaaattcttcagttccttctcgaaatcattgatcttgatttga

SEQ ID NO: 2246 - protein, 67 aa, Arabidopsis thaliana
LCNCKFNPKVTATNKESKANTSPASFESSFYGMISISSSVFHGKTLPFSSLSSLKFFSSFSKSLILI

SEQ ID NO: 2247 - DNA, 96 bp, Arabidopsis thaliana
  source 1..96: mol_type = genomic DNA
tgatttccatttcctcttccgttttccacgggaagacacttcccttctcttctttatcttctctcaaattcttcagttccttctcgaaatcattga

SEQ ID NO: 2248 - protein, 30 aa, Arabidopsis thaliana
FPFPLPFSTGRHFPSLLYLLSNSSVPSRNH

SEQ ID NO: 2249 - DNA, 54 bp, Arabidopsis thaliana
  source 1..54: mol_type = genomic DNA
taaatcaatagacattcctctctttgtctctctctatccaaatttgaactgtaa

SEQ ID NO: 2250 - protein, 16 aa, Arabidopsis thaliana
INRHSSLCLSLSKFEL

SEQ ID NO: 2251 - DNA, 159 bp, Arabidopsis thaliana
  source 1..159: mol_type = genomic DNA
taagctctcctccgagtattgttggcttcagaccaaatcttctccggcgctgtagcgtttcccccgatggcaagagcttggaacatgagcattgcaatggttcatagggatatagagagggattggggagatcaatgtggatattgtttttattattaa

SEQ ID NO: 2252 - protein, 51 aa, Arabidopsis thaliana
ALLRVLLASDQIFSGAVAFPPMARAWNMSIAMVHRDIERDWGDQCGYCFYY

SEQ ID NO: 2253 - DNA, 75 bp, Arabidopsis thaliana
  source 1..75: mol_type = genomic DNA
tgacatctccccctccagctattatatagtctccttttttcttttctgcattcacataatatttcccctatatag

SEQ ID NO: 2254 - protein, 23 aa, Arabidopsis thaliana
HLPLQLLYSLLFSFLHSHNISPI

SEQ ID NO: 2255 - DNA, 54 bp, Arabidopsis thaliana
  source 1..54: mol_type = genomic DNA
tgacgaacgagaagctttgttccggtgacgatcatatttgatatttgtggatga

SEQ ID NO: 2256 - protein, 16 aa, Arabidopsis thaliana
RTRSFVPVTIIFDICG

SEQ ID NO: 2257 - DNA, 126 bp, Arabidopsis thaliana
  source 1..126: mol_type = genomic DNA
tgatttttttttggtttccttctcattattcttcatgattcctccttttttctgtttctcgaaatttgtggttataaaattcacattttttttgggagcagttgggtttcaatcatgtgtttatga

SEQ ID NO: 2258 - protein, 40 aa, Arabidopsis thaliana
FFFGFLLIILHDSSFFLFLEICGYKIHIFFGSSWVSIMCL

SEQ ID NO: 2259 - DNA, 66 bp, Arabidopsis thaliana
  source 1..66: mol_type = genomic DNA
taaaattcacattttttttgggagcagttgggtttcaatcatgtgtttatgatgttatattattaa

SEQ ID NO: 2260 - protein, 20 aa, Arabidopsis thaliana
NSHFFWEQLGFNHVFMMLYY

SEQ ID NO: 2261 - DNA, 411 bp, Arabidopsis thaliana
  source 1..411: mol_type = genomic DNA
taacagagaagaagaagaagatgtcttatcaagacccacaacatcccgttagtgctcctcctcctcaagggtatcctcctaaggaaggatatccaccagcagggtatcctccaccagcaggttatcctccaccacaatatcctcaagcgggatatcctccagcaggttatcctccaccgcagcaaggatacggtcaaggatatccagcacaaggctatcctccaccgcaatatcctcaaggtcatccaccacaatatccttatcaaggtcctccaccaccgcattatggtcaggctccaccgaaaaataagaaagataagaaggattcaggaggcttcatggaaggatgtttggctatgctctgctgttgcgttctcttggaagcttgcttttgatcggaagatgagctga

SEQ ID NO: 2262 - protein, 135 aa, Arabidopsis thaliana
QRRRRRCLIKTHNIPLVLLLLKGILLRKDIHQQGILHQQVILHHNILKRDILQQVILHRSKDTVKDIQHKAILHRNILKVIHHNILIKVLHHRIMVRLHRKIRKIRRIQEASWKDVWLCSAVAFSWKLAFDRKMS

SEQ ID NO: 2263 - DNA, 63 bp, Arabidopsis thaliana
  source 1..63: mol_type = genomic DNA
tagaaacgagtaaaaaacaaaaccctaaaggttgaaacttggttgacgaaaaaaatgagctga

SEQ ID NO: 2264 - protein, 19 aa, Arabidopsis thaliana
KRVKNKTLKVETWLTKKMS

SEQ ID NO: 2265 - DNA, 57 bp, Arabidopsis thaliana
  source 1..57: mol_type = genomic DNA
tgatccggtacttctgaagctccgattctacgtcgactactttttctccgatgttaa

SEQ ID NO: 2266 - protein, 17 aa, Arabidopsis thaliana
SGTSEAPILRRLLFLRC

SEQ ID NO: 2267 - DNA, 105 bp, Arabidopsis thaliana
  source 1..105: mol_type = genomic DNA
tgaattggtagtagcttggtatatgcaaaaatccaaagcagcacagggctagaaggagctgcttatcgcttctggaaggctcagtcccaactcggacttccatga

SEQ ID NO: 2268 - protein, 33 aa, Arabidopsis thaliana
IGSSLVYAKIQSSTGLEGAAYRFWKAQSQLGLP

SEQ ID NO: 2269 - DNA, 72 bp, Arabidopsis thaliana
  source 1..72: mol_type = genomic DNA
tgattgaagattgtattagatccgattaatcgtcttcctggtcgcttgaactgtttatccagtaatcaatga

SEQ ID NO: 2270 - protein, 22 aa, Arabidopsis thaliana
LKIVLDPINRLPGRLNCLSSNQ

SEQ ID NO: 2271 - DNA, 72 bp, Arabidopsis thaliana
  source 1..72: mol_type = genomic DNA
tgaaaaaacaaaaaaaagctccgtcgccgggactcgaacccgggtctctcgggtgagagccgagtatcctaa

SEQ ID NO: 2272 - protein, 22 aa, Arabidopsis thaliana
KNKKKLRRRDSNPGLSGESRVS

SEQ ID NO: 2273 - DNA, 195 bp, Arabidopsis thaliana
  source 1..195: mol_type = genomic DNA
tagggttttctcatcaatcaatcaatcatcatcatcacccaaatccttccgccgacgtctctttcttgtttccgttttctctctccgatctctgactcatccatcgtattgaccaattccctaatcaaaatccttcgaatctcaatttgcttcgttaagaaatctgtagatctagcagaaaaaattcatatttga

SEQ ID NO: 2274 - protein, 63 aa, Arabidopsis thaliana
GFLINQSIIIITQILPPTSLSCFRFLSPISDSSIVLTNSLIKILRISICFVKKSVDLAEKIHI

SEQ ID NO: 2275 - DNA, 180 bp, Arabidopsis thaliana
  source 1..180: mol_type = genomic DNA
taaggagagtgtgaggttaaactgaaaaaagaagaatcccaaattccaactacattcctcagggaagccaaagtggccttcacaatcctaaagttaaaactcttgagtgttttttttcagatcaagacaaagtttagatcttttctttttggtttaattgttttgacacaaacgaggtaa

SEQ ID NO: 2276 - protein, 58 aa, Arabidopsis thaliana
GECEVKLKKEESQIPTTFLREAKVAFTILKLKLLSVFFQIKTKFRSFLFGLIVLTQTR

SEQ ID NO: 2277 - DNA, 153 bp, Arabidopsis thaliana
  source 1..153: mol_type = genomic DNA
taactaactctttgttttttttcggtttttgtgccatcttccagttttcattttttttgtttcccctctatctttttgggtaatagggtttctaatctctgggacaaactccaatcgtttcgaatccgcaatgcccagatggtcgatcaatag

SEQ ID NO: 2278 - protein, 49 aa, Arabidopsis thaliana
LTLCFFSVFVPSSSFHFFCFPSIFLGNRVSNLWDKLQSFRIRNAQMVDQ

SEQ ID NO: 2279 - DNA, 177 bp, Arabidopsis thaliana
  source 1..177: mol_type = genomic DNA
tgattcggatccatcactctctctttctctacatcaatttgttttctcagatcttcatctttttttcgtatacctgtatttgtcgaccttttctctcaatcactaaaccctcaaatcctttttttggattataagattgcttctctgattgtaattgctttgatgtgtatcagttga

SEQ ID NO: 2280 - protein, 57 aa, Arabidopsis thaliana
FGSITLSFSTSICFLRSSSFFRIPVFVDLFSQSLNPQILFLDYKIASLIVIALMCIS

SEQ ID NO: 2281 - DNA, 108 bp, Arabidopsis thaliana
  source 1..108: mol_type = genomic DNA
tgagtactcttgactctggtccttatggaacttttattggaatctatgatggccatggcgggcctgagacgtcgcgatttgttaatgatcacctttttcagcatctaa

SEQ ID NO: 2282 - protein, 34 aa, Arabidopsis thaliana
VLLTLVLMELLLESMMAMAGLRRRDLLMITFFSI

SEQ ID NO: 2283 - DNA, 336 bp, Arabidopsis thaliana
  source 1..336: mol_type = genomic DNA
tgagggatgttatcaacgttaatgaaactcttgagtgcttgtctgtggccgtcttcttcctcgggcaagtcctctgattcaactggaaaacaagatggattgctttggtacaaagactttggtcagcacctcgttggtgaattctccatggctgttgttcaagccaacaacttgcttgaggatcagagccaagttgagtctgggcctttgagtactcttgactctggtccttatggaacttttattggaatctatgatggccatggcgggcctgagacgtcgcgatttgttaatgatcacctttttcagcatctaaagagtgaggaaactgaatga

SEQ ID NO: 2284 - protein, 110 aa, Arabidopsis thaliana
GMLSTLMKLLSACLWPSSSSGKSSDSTGKQDGLLWYKDFGQHLVGEFSMAVVQANNLLEDQSQVESGPLSTLDSGPYGTFIGIYDGHGGPETSRFVNDHLFQHLKSEETE

SEQ ID NO: 2285 - DNA, 87 bp, Arabidopsis thaliana
  source 1..87: mol_type = genomic DNA
tgatcaacctttgaatcaatttccaaaacccttaaggtatacacttttttttatctcggtctctatggaaaagctttgattttgtga

SEQ ID NO: 2286 - protein, 27 aa, Arabidopsis thaliana
STFESISKTLKVYTFFYLGLYGKALIL

SEQ ID NO: 2287 - DNA, 60 bp, Arabidopsis thaliana
  source 1..60: mol_type = genomic DNA
tgagtggtatgtttagtatttgaaggagcttctcactgtgatgtggaagtaatcatatga

SEQ ID NO: 2288 - protein, 18 aa, Arabidopsis thaliana
VVCLVFEGASHCDVEVII

SEQ ID NO: 2289 - DNA, 192 bp, Arabidopsis thaliana
  source 1..192: mol_type = genomic DNA
tgaatgaaggtccgtaagggaagaagacagatgattgcgaaagagcaagacgaatacaaattacgccaacaaggtcttgtttttcaaatggcttctcttttcctctctttcgattactccttactcttcttttggttgctcttccgcgttttcttatacgagaatcacgaacgaaaactccagattttctag

SEQ ID NO: 2290 - protein, 62 aa, Arabidopsis thaliana
MKVRKGRRQMIAKEQDEYKLRQQGLVFQMASLFLSFDYSLLFFWLLFRVFLYENHERKLQIF

SEQ ID NO: 2291 - DNA, 51 bp, Arabidopsis thaliana
  source 1..51: mol_type = genomic DNA
tagttaaggttagtagtagtagataggtttaataaatttgtagttaagtaa

SEQ ID NO: 2292 - protein, 15 aa, Arabidopsis thaliana
LRLVVVDRFNKFVVK

SEQ ID NO: 2293 - DNA, 111 bp, Arabidopsis thaliana
  source 1..111: mol_type = genomic DNA
taagttaaccgtcagtctctcacctgcagcaaaattcactcttctgctaataatgttctccacagagattcatctattgatcattttgactttttcaggaaccagagatga

SEQ ID NO: 2294 - protein, 35 aa, Arabidopsis thaliana
VNRQSLTCSKIHSSANNVLHRDSSIDHFDFFRNQR

SEQ ID NO: 2295 - DNA, 111 bp, Arabidopsis thaliana; identical to SEQ ID NO: 2293
  source 1..111: mol_type = genomic DNA

SEQ ID NO: 2296 - protein, 35 aa, Arabidopsis thaliana; identical to SEQ ID NO: 2294

SEQ ID NO: 2297 - DNA, 66 bp, Arabidopsis thaliana
  source 1..66: mol_type = genomic DNA
tgagacagtgttgtgtctgtgtactgcgtagggtttagtgagtccatttgcaaagatgactcgtga

SEQ ID NO: 2298 - protein, 20 aa, Arabidopsis thaliana
DSVVSVYCVGFSESICKDDS

SEQ ID NO: 2299 - DNA, 84 bp, Arabidopsis thaliana
  source 1..84: mol_type = genomic DNA
tgaatcctaacaaagactttagttttggtcgatcttataattttctttttttattctatggatttctcttccgggtttcaataa

SEQ ID NO: 2300 - protein, 26 aa, Arabidopsis thaliana
ILTKTLVLVDLIIFFFYSMDFSSGFQ

SEQ ID NO: 2301 - DNA, 276 bp, Arabidopsis thaliana
  source 1..276: mol_type = genomic DNA
tagatcgctttctctaaccctaaaatacgtagagagatcagatacctgaaaacaaccaatcaatcatggagtacgctgctcggagaaatcagaaaggcgctttcgaaggcttttacaaacttatcatgcgccgtaattccgtctacgtcactttcatcatcgccggcgcatttttcggtgaacgggctgtggattacggtgttcataagctctgggaacgcaacaatgttgggaaacgatatgaagacatctctgtgttgggtcaaaggccagtag

SEQ ID NO: 2302 - protein, 90 aa, Arabidopsis thaliana
IAFSNPKIRREIRYLKTTNQSWSTLLGEIRKALSKAFTNLSCAVIPSTSLSSSPAHFSVNGLWITVFISSGNATMLGNDMKTSLCWVKGQ

SEQ ID NO: 2303 - DNA, 144 bp, Arabidopsis thaliana
  source 1..144: mol_type = genomic DNA
tagcctttttgctctttctttgcttctctaacaaaccaacttcagcgacaagataacaaaacgctttcacacgatcggataaaatggcggagaagagctttaagtacatcatcctcggcggcggcgtctctgccagcatcttaa

SEQ ID NO: 2304 - protein, 46 aa, Arabidopsis thaliana
PFCSFFASLTNQLQRQDNKTLSHDRIKWRRRALSTSSSAAASLPAS

SEQ ID NO: 2305 - DNA, 108 bp, Arabidopsis thaliana
  source 1..108: mol_type = genomic DNA
tgacaaattttctccattaaaagtgtcttcttttttagctgtattaaatttataggtctctctatctgtactggtatagggttcatgattgagtctacaaaaacataa

SEQ ID NO: 2306 - protein, 34 aa, Arabidopsis thaliana
QIFSIKSVFFFSCIKFIGLSICTGIGFMIESTKT

SEQ ID NO: 2307 - DNA, 174 bp, Arabidopsis thaliana
  source 1..174: mol_type = genomic DNA
tgaagaagcatattcgacggtcaccaccaaacctcttccgtcggattttcactctccgtttatcgaacatctgagatctctctccacttccgtcaccgaagatgcattccagtcatcttcttctcgaggagccgatcaggatggcttcaatcctcgagccttccaaatctgtga

SEQ ID NO: 2308 - protein, 56 aa, Arabidopsis thaliana
RSIFDGHHQTSSVGFSLSVYRTSEISLHFRHRRCIPVIFFSRSRSGWLQSSSLPNL

SEQ ID NO: 2309 - DNA, 138 bp, Arabidopsis thaliana
  source 1..138: mol_type = genomic DNA
tgagatctctctccacttccgtcaccgaagatgcattccagtcatcttcttctcgaggagccgatcaggatggcttcaatcctcgagccttccaaatctgtgagctctctctctctctctctcagcttgataatttag

SEQ ID NO: 2310 - protein, 44 aa, Arabidopsis thaliana
DLSPLPSPKMHSSHLLLEEPIRMASILEPSKSVSSLSLSLSLII

SEQ ID NO: 2311 - DNA, 87 bp, Arabidopsis thaliana
  source 1..87: mol_type = genomic DNA
taaaagatggtttcttgtttgaaacctcaactggtttatcaagaatgtgagtttcagtcttgttcctttctttgtcaaataaagtga

SEQ ID NO: 2312 - protein, 27 aa, Arabidopsis thaliana
KMVSCLKPQLVYQECEFQSCSFLCQIK

SEQ ID NO: 2313 - DNA, 63 bp, Arabidopsis thaliana
  source 1..63: mol_type = genomic DNA
tgaaacctcaactggtttatcaagaatgtgagtttcagtcttgttcctttctttgtcaaataa

SEQ ID NO: 2314 - protein, 19 aa, Arabidopsis thaliana
NLNWFIKNVSFSLVPFFVK

SEQ ID NO: 2315 - DNA, 132 bp, Arabidopsis thaliana
  source 1..132: mol_type = genomic DNA
tgacaatgcctcgctatgatgatcgctatggaaacactcgcctctatgttggtcgcttatcatctagaactcgtaccagagaccttgagcgtctctttagcagatacggaaggtttctgggggtttgcctaa

SEQ ID NO: 2316 - protein, 42 aa, Arabidopsis thaliana
QCLAMMIAMETLASMLVAYHLELVPETLSVSLADTEGFWGFA

SEQ ID NO: 2317 - DNA, 51 bp, Arabidopsis thaliana
  source 1..51: mol_type = genomic DNA
tgaatgggtggactgtggtgtaattggtggaaattctcgtctggtgtatag

SEQ ID NO: 2318 - protein, 15 aa, Arabidopsis thaliana
MGGLWCNWWKFSSGV

SEQ ID NO: 2319 - DNA, 261 bp, Arabidopsis thaliana
  source 1..261: mol_type = genomic DNA
taatcgcagtatcatccgcggttcacttccttcgtttcgaaattattagggttactgcgtatttgcactctccttcttcgtctctccagcttgacaatgcctcgctatgatgatcgctatggaaacactcgcctctatgttggtcgcttatcatctagaactcgtaccagagaccttgagcgtctctttagcagatacggaaggtttctgggggtttgcctaacctggagatgtttgatgaatgggtggactgtggtgtaa

SEQ ID NO: 2320 - protein, 85 aa, Arabidopsis thaliana
SQYHPRFTSFVSKLLGLLRICTLLLRLSSLTMPRYDDRYGNTRLYVGRLSSRTRTRDLERLFSRYGRFLGVCLTWRCLMNGWTVV

SEQ ID NO: 2321 - DNA, 75 bp, Arabidopsis thaliana
  source 1..75: mol_type = genomic DNA
tagctttttaacatcttggctgggtttcgtgtgatttcgttttggatatggttgttcggattcttgttaccatga

SEQ ID NO: 2322 - protein, 23 aa, Arabidopsis thaliana
LFNILAGFRVISFWIWLFGFLLP

SEQ ID NO: 2323 - DNA, 78 bp, Arabidopsis thaliana
  source 1..78: mol_type = genomic DNA
taacatcttggctgggtttcgtgtgatttcgttttggatatggttgttcggattcttgttaccatgattcggctatag

SEQ ID NO: 2324 - protein, 24 aa, Arabidopsis thaliana
HLGWVSCDFVLDMVVRILVTMIRL

SEQ ID NO: 2325 - DNA, 240 bp, Arabidopsis thaliana
  source 1..240: mol_type = genomic DNA
tgatttttagatagctctgagatctgtctctgcgattcgtcggatttgaattcgtttttttttttgggtagctcttggatttcttcttctagggtttccaagaggatagagaaaatgcgggtgtcctctgagatactccttctttctttggttccggcgttgactttttatcattctggtttaagttctaatcgtttgaaacctcttcaaaagagtgattggcgtggtaatcttagttaa

SEQ ID NO: 2326 - protein, 78 aa, Arabidopsis thaliana
FLDSSEICLCDSSDLNSFFFLGSSWISSSRVSKRIEKMRVSSEILLLSLVPALTFYHSGLSSNRLKPLQKSDWRGNLS

SEQ ID NO: 2327 - DNA, 78 bp, Arabidopsis thaliana; identical to SEQ ID NO: 2323
  source 1..78: mol_type = genomic DNA

SEQ ID NO: 2328 - protein, 24 aa, Arabidopsis thaliana
HLGWVSCDFVLDMVVRILVTMIRL

SEQ ID NO: 2329 - DNA, 75 bp, Arabidopsis thaliana; identical to SEQ ID NO: 2321
  source 1..75: mol_type = genomic DNA

SEQ ID NO: 2330 - protein, 23 aa, Arabidopsis thaliana
LFNILAGFRVISFWIWLFGFLLP

SEQ ID NO: 2331 - DNA, 75 bp, Arabidopsis thaliana; identical to SEQ ID NO: 2321
  source 1..75: mol_type = genomic DNA

SEQ ID NO: 2332 - protein, 23 aa, Arabidopsis thaliana
LFNILAGFRVISFWIWLFGFLLP

SEQ ID NO: 2333 - DNA, 78 bp, Arabidopsis thaliana; identical to SEQ ID NO: 2323
  source 1..78: mol_type = genomic DNA

SEQ ID NO: 2334 - protein, 24 aa, Arabidopsis thaliana
HLGWVSCDFVLDMVVRILVTMIRL

SEQ ID NO: 2335 - DNA, 93 bp, Arabidopsis thaliana
  source 1..93: mol_type = genomic DNA
tgacaaaatcctcttatagggttattcttagctatgaatttcctctgcaatttctttttttccccgccaaaatttctcctgaagcaaatgtag

SEQ ID NO: 2336 - protein, 29 aa, Arabidopsis thaliana
QNPLIGLFLAMNFLCNFFFSPPKFLLKQM

SEQ ID NO: 2337 - DNA, 117 bp, Arabidopsis thaliana
  source 1..117: mol_type = genomic DNA
taggtgacaaaatcctcttatagggttattcttagctatgaatttcctctgcaatttctttttttccccgccaaaatttctcctgaagcaaatgtagctttttacttgctgaactag

SEQ ID NO: 2338 - protein, 37 aa, Arabidopsis thaliana
VTKSSYRVILSYEFPLQFLFFPAKISPEANVAFYLLN

SEQ ID NO: 2339 - DNA, 66 bp, Arabidopsis thaliana
  source 1..66: mol_type = genomic DNA
taagaggaggaagaaaattgttcccgggagcttgttgaaagctgtggtgcgacctggaggaggtga

SEQ ID NO: 2340 - protein, 20 aa, Arabidopsis thaliana
EEEENCSRELVESCGATWRR

SEQ ID NO: 2341 - DNA, 78 bp, Arabidopsis thaliana
  source 1..78: mol_type = genomic DNA
taattccaatctgaatctgcaaaaaagtcttacgtcacactcccatgtagtagccgtcacttctcgtcttcctcctag

SEQ ID NO: 2342 - protein, 24 aa, Arabidopsis thaliana
FQSESAKKSYVTLPCSSRHFSSSS

SEQ ID NO: 2343 - DNA, 162 bp, Arabidopsis thaliana
  source 1..162: mol_type = genomic DNA
tagcttttctactaccaaacctttttctgtttggaaattttcgattttggatttaacccttttcttaccttatttataaccatgcaatctcacgaccaacaacccttcaatctccatggcggaatccggcgatttcaacggtggtcaacctcctcctcatag

SEQ ID NO: 2344 - protein, 52 aa, Arabidopsis thaliana
LFYYQTFFCLEIFDFGFNPFLTLFITMQSHDQQPFNLHGGIRRFQRWSTSSS

SEQ ID NO: 2345 - DNA, 135 bp, Arabidopsis thaliana
  source 1..135: mol_type = genomic DNA
taaattagggtttcagattttttagattttatctcttcaattcgagccagtgaattgccgcctcctcctcctcctcttcttccctcaatacataaccaaagcaatgaaattctacttgtatcctgtaatggctga

SEQ ID NO: 2346 - protein, 43 aa, Arabidopsis thaliana
IRVSDFLDFISSIRASELPPPPPPLLPSIHNQSNEILLVSCNG

SEQ ID NO: 2347 - DNA, 117 bp, Arabidopsis thaliana
  source 1..117: mol_type = genomic DNA
tagattttatctcttcaattcgagccagtgaattgccgcctcctcctcctcctcttcttccctcaatacataaccaaagcaatgaaattctacttgtatcctgtaatggctgactaa

SEQ ID NO: 2348 - protein, 37 aa, Arabidopsis thaliana
ILSLQFEPVNCRLLLLLFFPQYITKAMKFYLYPVMAD

SEQ ID NO: 2349 - DNA, 207 bp, Arabidopsis thaliana
  source 1..207: mol_type = genomic DNA
tgaatcgtcgtaatcgtggctcttcttcttcttcttctagggtttcgaatacttatgggaaccgccagttctctgataacccgaggactggatccggcggcggagttaatgaatcctttcagagaagatccgatgcaccgcacaaacgaaacaatgaaaaagacgaatcaaaacataaagacgaagatcctgctgacgtttcattga

SEQ ID NO: 2350 - protein, 67 aa, Arabidopsis thaliana
IVVIVALLLLLLGFRILMGTASSLITRGLDPAAELMNPFREDPMHRTNETMKKTNQNIKTKILLTFH

SEQ ID NO: 2351 - DNA, 78 bp, Arabidopsis thaliana
  source 1..78: mol_type = genomic DNA
tgatttctccacttcctctctctctctactgcaacttcctcctcctgcttcaacttcattcgggtaatgatgaactag

SEQ ID NO: 2352 - protein, 24 aa, Arabidopsis thaliana
FLHFLSLSTATSSSCFNFIRVMMN

SEQ ID NO: 2353 - DNA, 201 bp, Arabidopsis thaliana
  source 1..201: mol_type = genomic DNA
tgaaataaggaaccctatttctttcatctaatcctcgatttcatcagattaatgttgtttacatttgtgaatgcgtgtttgaattctgaatcctgggtttgtggagttggaattgagtctgacaagaagattgggtttcttcataatatagttataagcactgatttgatgaacgatttgatagctggttcttttggttga

SEQ ID NO: 2354 - protein, 65 aa, Arabidopsis thaliana
NKEPYFFHLILDFIRLMLFTFVNACLNSESWVCGVGIESDKKIGFLHNIVISTDLMNDLIAGSFG

SEQ ID NO: 2355 - DNA, 198 bp, Arabidopsis thaliana
  source 1..198: mol_type = genomic DNA
taatacgagcggtggttgctcacgcgccatccagtttggctggagatgctattctgcatttcgacagtgaagcttttcgggtttcaacaaaggcgcaatgttagctctttagccaagcgtttcagtctcgccgggaaactaacgttagagctccaaactcaggtcactgttcgcctccaaagttatctatgctggtga

SEQ ID NO: 2356 - protein, 64 aa, Arabidopsis thaliana
YERWLLTRHPVWLEMLFCISTVKLFGFQQRRNVSSLAKRFSLAGKLTLELQTQVTVRLQSYLCW

SEQ ID NO: 2357 - DNA, 108 bp, Arabidopsis thaliana
  source 1..108: mol_type = genomic DNA
tagctctttagccaagcgtttcagtctcgccgggaaactaacgttagagctccaaactcaggtcactgttcgcctccaaagttatctatgctggtgactgcatgttga

SEQ ID NO: 2358 - protein, 34 aa, Arabidopsis thaliana
LFSQAFQSRRETNVRAPNSGHCSPPKLSMLVTAC

SEQ ID NO: 2359 - DNA, 99 bp, Arabidopsis thaliana
  source 1..99: mol_type = genomic DNA
tagcctcagggctttagctggccgtgcagagggattcggacgcttcgccgtcggtggtctccacggcgatctctatgtcgtcacttctcttgcaggtga

SEQ ID NO: 2360 - protein, 31 aa, Arabidopsis thaliana
PQGFSWPCRGIRTLRRRWSPRRSLCRHFSCR

SEQ ID NO: 2361 - DNA, 96 bp, Arabidopsis thaliana
  source 1..96: mol_type = genomic DNA
tagctggccgtgcagagggattcggacgcttcgccgtcggtggtctccacggcgatctctatgtcgtcacttctcttgcaggtgatgtattcgtaa

SEQ ID NO: 2362 - protein, 30 aa, Arabidopsis thaliana
LAVQRDSDASPSVVSTAISMSSLLLQVMYS

SEQ ID NO: 2363 - DNA, 51 bp, Arabidopsis thaliana
  source 1..51: mol_type = genomic DNA
tgaagaagcttgtttacttgtatttgctacaatatgcagaaaagtatgtga

SEQ ID NO: 2364 - protein, 15 aa, Arabidopsis thaliana
RSLFTCICYNMQKSM

SEQ ID NO: 2365 - DNA, 75 bp, Arabidopsis thaliana
  source 1..75: mol_type = genomic DNA
tagcaaacaaatgatacccccatgtcttgtgtgtctgcttcatgcaacatgttggtttggatttggttaatctaa

SEQ ID NO: 2366 - protein, 23 aa, Arabidopsis thaliana
QTNDTPMSCVSASCNMLVWIWLI

SEQ ID NO: 2367 - DNA, 84 bp, Arabidopsis thaliana
  source 1..84: mol_type = genomic DNA
taaaggtatgatgatagcaaacaaatgatacccccatgtcttgtgtgtctgcttcatgcaacatgttggtttggatttggttaa

SEQ ID NO: 2368 - protein, 26 aa, Arabidopsis thaliana
RYDDSKQMIPPCLVCLLHATCWFGFG

SEQ ID NO: 2369 - DNA, 72 bp, Arabidopsis thaliana
  source 1..72: mol_type = genomic DNA
tgatacccccatgtcttgtgtgtctgcttcatgcaacatgttggtttggatttggttaatctaaaagtttaa

SEQ ID NO: 2370 - protein, 22 aa, Arabidopsis thaliana
YPHVLCVCFMQHVGLDLVNLKV

SEQ ID NO: 2371 - DNA, 147 bp, Arabidopsis thaliana
  source 1..147: mol_type = genomic DNA
tgacatcaacgcaacaaaaacgatgaagaaacctcatttcttgaagaatccagtgtttttcctatttctactcatcactgtttcttccctaactatactcatcttctcctttctcaaattaccggaaacacctctcgccgccggtaa

SEQ ID NO: 2372 - protein, 47 aa, Arabidopsis thaliana
HQRNKNDEETSFLEESSVFPISTHHCFFPNYTHLLLSQITGNTSRRR

SEQ ID NO: 2373 - DNA, 90 bp, Arabidopsis thaliana
  source 1..90: mol_type = genomic DNA
taaagaataccgtgtgctctccacgctaagtggcatacgcctatttttggagggatctcacttcacagtgggacccaacatttacactag

SEQ ID NO: 2374 - protein, 28 aa, Arabidopsis thaliana
RIPCALHAKWHTPIFGGISLHSGTQHLH

SEQ ID NO: 2375 - DNA, 69 bp, Arabidopsis thaliana
  source 1..69: mol_type = genomic DNA
taagtggcatacgcctatttttggagggatctcacttcacagtgggacccaacatttacactagtctga

SEQ ID NO: 2376 - protein, 21 aa, Arabidopsis thaliana
VAYAYFWRDLTSQWDPTFTLV

SEQ ID NO: 2377 - DNA, 81 bp, Arabidopsis thaliana
  source 1..81: mol_type = genomic DNA
taaagaataccgtgtgctctccacgccaagtggcatacgcctatttttggagggctctcacgtaaatgtgagacccaatag

SEQ ID NO: 2378 - protein, 25 aa, Arabidopsis thaliana
RIPCALHAKWHTPIFGGLSRKCETQ

SEQ ID NO: 2379 - DNA, 99 bp, Arabidopsis thaliana
  source 1..99: mol_type = genomic DNA
tgagcacaaagcgaactactctttcgccttttactaaagaataccgtgtgctctccacgccaagtggcatacgcctatttttggagggctctcacgtaa

SEQ ID NO: 2380 - protein, 31 aa, Arabidopsis thaliana
AQSELLFRLLLKNTVCSPRQVAYAYFWRALT

SEQ ID NO: 2381 - DNA, 501 bp, Arabidopsis thaliana
  source 1..501: mol_type = genomic DNA
tagtgtagtagtagatgcggcggacggagttaccaaagaagaaggccgctcaaaataattaaatttgttcaaccgtcatcttcttcaactgatcttagctcaactaacacactctttcttcttggcgtcaattcaatcaaccaaaacctttttctcctatctagctcacgctttcttcttcttccaatggcgtcttctgcagctctcggatctctccatcagactttagggtcagccattaattcacagagtgaggttcactcgctttctggaaactggtctgcctctggtaattcatgtgtgccacggtggagattatccaacaggaacagcaactacaggctcgtgttacgtgctaaggccgctaaatcttcgacaacaaccataagtgatggttcatctgatgctagtgtgtcagacgggaagaaaacagttcgacggataactttcccgaaagaagtggaggtttcttccttgcctttcatgggtcttagatattag

SEQ ID NO: 2382 - protein, 165 aa, Arabidopsis thaliana
CSSRCGGRSYQRRRPLKIIKFVQPSSSSTDLSSTNTLFLLGVNSINQNLFLLSSSRFLLLPMASSAALGSLHQTLGSAINSQSEVHSLSGNWSASGNSCVPRWRLSNRNSNYRLVLRAKAAKSSTTTISDGSSDASVSDGKKTVRRITFPKEVEVSSLPFMGLRY

SEQ ID NO: 2383 - DNA, 87 bp, Arabidopsis thaliana
  source 1..87: mol_type = genomic DNA
tagtgtgtcagacgggaagaaaacagttcgacggataactttcccgaaagaagtggaggtttcttccttgcctttcatgggtcttag

SEQ ID NO: 2384 - protein, 27 aa, Arabidopsis thaliana
CVRREENSSTDNFPERSGGFFLAFHGS

SEQ ID NO: 2385 - DNA, 60 bp, Arabidopsis thaliana
  source 1..60: mol_type = genomic DNA
taagtgatggttcatctgatgctagtgtgtcagacgggaagaaaacagttcgacggataa

SEQ ID NO: 2386 - protein, 18 aa, Arabidopsis thaliana
VMVHLMLVCQTGRKQFDG

SEQ ID NO: 2387 - DNA, 87 bp, Arabidopsis thaliana; identical to SEQ ID NO: 2383
  source 1..87: mol_type = genomic DNA

SEQ ID NO: 2388 - protein, 27 aa, Arabidopsis thaliana
CVRREENSSTDNFPERSGGFFLAFHGS

SEQ ID NO: 2389 - DNA, 501 bp, Arabidopsis thaliana; identical to SEQ ID NO: 2381
  source 1..501: mol_type = genomic DNA

SEQ ID NO: 2390 - protein, 165 aa, Arabidopsis thaliana; identical to SEQ ID NO: 2382

SEQ ID NO: 2391 - DNA, 60 bp, Arabidopsis thaliana; identical to SEQ ID NO: 2385
  source 1..60: mol_type = genomic DNA

SEQ ID NO: 2392 - protein, 18 aa, Arabidopsis thaliana
VMVHLMLVCQTGRKQFDG

SEQ ID NO: 2393 - DNA, 87 bp, Arabidopsis thaliana
  source 1..87: mol_type = genomic DNA
tgatcagtaactatgattactgtaaatagatcactctttcattatctttccctttcacttgtacaaaccaattcgttctcgagctaa

SEQ ID NO: 2394 - protein, 27 aa, Arabidopsis thaliana
SVTMITVNRSLFHYLSLSLVQTNSFSS

SEQ ID NO: 2395 - DNA, 225 bp, Arabidopsis thaliana
  source 1..225: mol_type = genomic DNA
tagagtgtaacggagagattcttctaccagagttgctctcttttggttcgttttcttcctccaaaatccaatcttaccacagtttctttagggtttcttcttcgtcttcctttggatctatgtgaacagtatgaactaagctctgaggtaagcttgggaagtagggatatggccaaaatctctttggtttaccaacttagcaaaaaagttagcaggagttggtga

SEQ ID NO: 2396 - protein, 73 aa, Arabidopsis thaliana
SVTERFFYQSCSLLVRFLPPKSNLTTVSLGFLLRLPLDLCEQYELSSEVSLGSRDMAKISLVYQLSKKVSRSW

SEQ ID NO: 2397 - DNA, 114 bp, Arabidopsis thaliana
  source 1..114: mol_type = genomic DNA
taagcttgggaagtagggatatggccaaaatctctttggtttaccaacttagcaaaaaagttagcaggagttggtgatcagttctcctaccggcttttgcaggctaataactaa

SEQ ID NO: 2398 - protein, 36 aa, Arabidopsis thaliana
AWEVGIWPKSLWFTNLAKKLAGVGDQFSYRLLQANN

SEQ ID NO: 2399 - DNA, 51 bp, Arabidopsis thaliana
  source 1..51: mol_type = genomic DNA
tagggtttcttcttcgtcttcctttggatctatgtgaacagtatgaactaa

SEQ ID NO: 2400 - protein, 15 aa, Arabidopsis thaliana
GFFFVFLWIYVNSMN

SEQ ID NO: 2401 - DNA, 171 bp, Arabidopsis thaliana
  source 1..171: mol_type = genomic DNA
tagccttcgatgctgcatgcaattcccaagactctttctgattgctacaacgccgtgatttctctctgccatttccttcgatttgatttctgggttctcttcttctcgtctctcttctgcatgtttcgccactctaccttagaaaaaaggttactttcgcctccgatttag

SEQ ID NO: 2402 - protein, 55 aa, Arabidopsis thaliana
PSMLHAIPKTLSDCYNAVISLCHFLRFDFWVLFFSSLFCMFRHSTLEKRLLSPPI

SEQ ID NO: 2403 - DNA, 78 bp, Arabidopsis thaliana
  source 1..78: mol_type = genomic DNA
tagaaaaaaggttactttcgcctccgatttaggctcgatttgatgaattcgtcgtcgtgtggctatttatcaaattga

SEQ ID NO: 2404 - protein, 24 aa, Arabidopsis thaliana
KKGYFRLRFRLDLMNSSSCGYLSN

SEQ ID NO: 2405 - DNA, 99 bp, Arabidopsis thaliana
  source 1..99: mol_type = genomic DNA
tgatttctgggttctcttcttctcgtctctcttctgcatgtttcgccactctaccttagaaaaaaggttactttcgcctccgatttaggctcgatttga

SEQ ID NO: 2406 - protein, 31 aa, Arabidopsis thaliana
FLGSLLLVSLLHVSPLYLRKKVTFASDLGSI

SEQ ID NO: 2407 - DNA, 90 bp, Arabidopsis thaliana
  source 1..90: mol_type = genomic DNA
taaatctgtctctgcacttatcatagtttcgtttctcttttgagaaagaaaaacccaaacttgccatgttttagatctggtcctttttaa

SEQ ID NO: 2408 - protein, 28 aa, Arabidopsis thaliana
ICLCTYHSFVSLLRKKNPNLPCFRSGPF

SEQ ID NO: 2409 - DNA, 102 bp, Arabidopsis thaliana
  source 1..102: mol_type = genomic DNA
taatcaatcaacaattgctttccttcccggccagccacagatctccgtggccatctctctctttctaattattacaaagaagcattattattattattttaa

SEQ ID NO: 2410 - protein, 32 aa, Arabidopsis thaliana
SINNCFPSRPATDLRGHLSLSNYYKEALLLLF

SEQ ID NO: 2411 - DNA, 147 bp, Arabidopsis thaliana
  source 1..147: mol_type = genomic DNA
taaattgactcattcgataagaacagagatgcaatcataaatatgagtgcaaagcacgttaccggaagctgtgatggccttgtttgcgtctaccgtatagaaagattgatgtgtatcatcaatcccgccactagatggattcggtaa

SEQ ID NO: 2412 - protein, 47 aa, Arabidopsis thaliana
IDSFDKNRDAIINMSAKHVTGSCDGLVCVYRIERLMCIINPATRWIR

SEQ ID NO: 2413 - DNA, 63 bp, Arabidopsis thaliana
  source 1..63: mol_type = genomic DNA
tgatggccttgtttgcgtctaccgtatagaaagattgatgtgtatcatcaatcccgccactag

SEQ ID NO: 2414 - protein, 19 aa, Arabidopsis thaliana
WPCLRLPYRKIDVYHQSRH

SEQ ID NO: 2415 - DNA, 135 bp, Arabidopsis thaliana
  source 1..135: mol_type = genomic DNA
tagatttggttcagttatggaataatggctcgtctcttgccatctctattcgtaattagcatcttcttcttcatccaaagactcctcctttcttcgttaatccatcgccagctattgaatctgaagcaaatctga

SEQ ID NO: 2416 - protein, 43 aa, Arabidopsis thaliana
IWFSYGIMARLLPSLFVISIFFFIQRLLLSSLIHRQLLNLKQI

SEQ ID NO: 2417 - DNA, 54 bp, Arabidopsis thaliana
  source 1..54: mol_type = genomic DNA
tgattttcttcgtttttttggataccgattcgattctctctcaccgatttttga

SEQ ID NO: 2418 - protein, 16 aa, Arabidopsis thaliana
FSSFFWIPIRFSLTDF

SEQ ID NO: 2419 - DNA, 111 bp, Arabidopsis thaliana
  source 1..111: mol_type = genomic DNA
tagaagtcgaaaaatctcgcttttagattcgttcaggcatttcgtcgagcaccttctctgcattactctcccctacttctctctattcattctttcaatgataagtcctaa

SEQ ID NO: 2420 - protein, 35 aa, Arabidopsis thaliana
KSKNLAFRFVQAFRRAPSLHYSPLLLSIHSFNDKS

SEQ ID NO: 2421 - DNA, 60 bp, Arabidopsis thaliana
  source 1..60: mol_type = genomic DNA
tagggttctgggaaaattagggttcatccatgctgtcgagttttagggtcaagtaaatga

SEQ ID NO: 2422 - protein, 18 aa, Arabidopsis thaliana
GSGKIRVHPCCRVLGSSK

SEQ ID NO: 2423 - DNA, 75 bp, Arabidopsis thaliana
  source 1..75: mol_type = genomic DNA
tgatttgataaatctcattttgtgtttttatcttcttccatggtcgttgttcttgttctacagtgcgattcgtga

SEQ ID NO: 2424 - protein, 23 aa, Arabidopsis thaliana
FDKSHFVFLSSSMVVVLVLQCDS

SEQ ID NO: 2425 - DNA, 72 bp, Arabidopsis thaliana
  source 1..72: mol_type = genomic DNA
taaatctcattttgtgtttttatcttcttccatggtcgttgttcttgttctacagtgcgattcgtgagctga

SEQ ID NO: 2426 - protein, 22 aa, Arabidopsis thaliana
ISFCVFIFFHGRCSCSTVRFVS

SEQ ID NO: 2427 - DNA, 114 bp, Arabidopsis thaliana
  source 1..114: mol_type = genomic DNA
taaaaaaccatttccatcatcggtttcctccgatacatctcctcgtcgccgttcttcggattttcactcttctgctcgaaaggtctctcactcttctcttttttaatctattga

SEQ ID NO: 2428 - protein, 36 aa, Arabidopsis thaliana
KTISIIGFLRYISSSPFFGFSLFCSKGLSLFSFLIY

SEQ ID NO: 2429 - DNA, 69 bp, Arabidopsis thaliana
  source 1..69: mol_type = genomic DNA
tagtccctgcgaaagaatgagactgagaagttggacatctcgatacttttggaaaccccgatttgttga

SEQ ID NO: 2430 - protein, 21 aa, Arabidopsis thaliana
SLRKNETEKLDISILLETPIC

SEQ ID NO: 2431 - DNA, 63 bp, Arabidopsis thaliana
  source 1..63: mol_type = genomic DNA
tgagctttgttctcatatcttgaattagacagtggaatagaaaagatgacaactttgtattag

SEQ ID NO: 2432 - protein, 19 aa, Arabidopsis thaliana
ALFSYLELDSGIEKMTTLY

SEQ ID NO: 2433 - DNA, 210 bp, Arabidopsis thaliana
  source 1..210: mol_type = genomic DNA
tgaaggaacaagtgggaattggggagggagggttggtgtttgtgtgttttgattactgatgttttctgctggagagggaaagaaatggactcgtcggaaagctggtcttgtaagtctacaaaaagtggcatctttggttcgggatctgagagagccttgtctttcacaatctcgcatacaagttgttttgactattggcaaaatgcttaa

SEQ ID NO: 2434 - protein, 68 aa, Arabidopsis thaliana
RNKWELGREGWCLCVLITDVFCWRGKEMDSSESWSCKSTKSGIFGSGSERALSFTISHTSCFDYWQNA

SEQ ID NO: 2435 - DNA, 195 bp, Arabidopsis thaliana
  source 1..195: mol_type = genomic DNA
taattgaaatgtcaacctaaattaaaaagagaaacttttgcgaaacacagaaaaagagaaagagagaaaaggcaggcagggataaatcaacggactttccctgggaagaaaaaatgttcaccggagaagaatgtcctccatgatcttcttctacaggtttctgtactgcttttgggctgctttgagaacggatga

SEQ ID NO: 2436 - protein, 63 aa, Arabidopsis thaliana
LKCQPKLKRETFAKHRKREREKRQAGINQRTFPGKKKCSPEKNVLHDLLLQVSVLLLGCFENG

SEQ ID NO: 2437 - DNA, 192 bp, Arabidopsis thaliana
  source 1..192: mol_type = genomic DNA
tgactgagcttgacatcgacgggaagcactatttctgtgatactagagacatcactcggcccttcccaagccgtatgccacttcaaagccctgatgatgaatttgtttggaatagatggttgtccgtgccttttaagaatattgggctacctgaacactgtgtcattcttctgcaggttcgtcctccattaa

SEQ ID NO: 2438 - protein, 62 aa, Arabidopsis thaliana
LSLTSTGSTISVILETSLGPSQAVCHFKALMMNLFGIDGCPCLLRILGYLNTVSFFCRFVLH

SEQ ID NO: 2439 - DNA, 648 bp, Arabidopsis thaliana
  source 1..648: mol_type = genomic DNA
tgagctcagatggatctgcatccaccaggtggttcaaaaaagacatctgtagttgttgtcaccttagacactggtgaagtctatgtcattgcaagtttgttatctaaggctgatactcaagttatctatatcgatcctacgactggtatcctgcggtacaatgggaagcctggccttgataattttaagtcagagcgtgaagccttagattatattacgaatggatcaagaggaggtgttagaagctctgtttatgccagggcaatactcggttatgctgtcttggggagctttgggatgcttttagttgcgaccaggctaaatccaagtattccagatttgcctggtggtggatgtgtatatacagtggctgagagtcaatgggtcaaaataccactctacaatccacagcctcaagggaaaggtgaaaccaagaatattcaggagttgactgagcttgacatcgacgggaagcactatttctgtgatactagagacatcactcggcccttcccaagccgtatgccacttcaaagccctgatgatgaatttgtttggaatagatggttgtccgtgccttttaagaatattgggctacctgaacactgtgtcattcttctgcaggttcgtcctccattaatgaattga

SEQ ID NO: 2440 - protein, 214 aa, Arabidopsis thaliana
AQMDLHPPGGSKKTSVVVVTLDTGEVYVIASLLSKADTQVIYIDPTTGILRYNGKPGLDNFKSEREALDYITNGSRGGVRSSVYARAILGYAVLGSFGMLLVATRLNPSIPDLPGGGCVYTVAESQWVKIPLYNPQPQGKGETKNIQELTELDIDGKHYFCDTRDITRPFPSRMPLQSPDDEFVWNRWLSVPFKNIGLPEHCVILLQVRPPLMN

SEQ ID NO: 2441 - DNA, 87 bp, Arabidopsis thaliana
  source 1..87: mol_type = genomic DNA
tgattacacatagtttctcttcattcatctctttctctccccgtcttttcttgttcctataatcatgtccgtccaataaaaccctaa

SEQ ID NO: 2442 - protein, 27 aa, Arabidopsis thaliana
LHIVSLHSSLSLPVFSCSYNHVRPIKP

SEQ ID NO: 2443 - DNA, 69 bp, Arabidopsis thaliana
  source 1..69: mol_type = genomic DNA
tagtttctcttcattcatctctttctctccccgtcttttcttgttcctataatcatgtccgtccaataa

SEQ ID NO: 2444 - protein, 21 aa, Arabidopsis thaliana
FLFIHLFLSPSFLVPIIMSVQ

SEQ ID NO: 2445 - DNA, 105 bp, Arabidopsis thaliana
  source 1..105: mol_type = genomic DNA
taatcagaaattgaagccgaatcagttgaaaaacaagaagtgaagcaaaaatggttggtggtggagctccacagagaggaagtgcagctgcaactgcaagcatga

SEQ ID NO: 2446 - protein, 33 aa, Arabidopsis thaliana
SEIEAESVEKQEVKQKWLVVELHREEVQLQLQA

SEQ ID NO: 2447 - DNA, 105 bp, Arabidopsis thaliana
  source 1..105: mol_type = genomic DNA
taagtttgtgttgttattgacttagttgaaaaacaagaagtgaagcaaaaatggttggtggtggagctccacagagaggaagtgcagctgcaactgcaagcatga

SEQ ID NO: 2448 - protein, 33 aa, Arabidopsis thaliana
VCVVIDLVEKQEVKQKWLVVELHREEVQLQLQA

SEQ ID NO: 2449 - DNA, 231 bp, Arabidopsis thaliana
  source 1..231: mol_type = genomic DNA
tgaagcaaaaatggttggtggtggagctccacagagaggaagtgcagctgcaactgcaagcatgaggaggaggaagcctgctggtggcagcagcagcgccggtggtggagctggaacaatgcttcagttctacacagacgacgcgcctggtctcaagatatctccaaatgttgttcttatcatgagcattggtttcattgcttttgtagctgttcttcatgtcatgggtaa

SEQ ID NO: 2450 - protein, 75 aa, Arabidopsis thaliana
SKNGWWWSSTERKCSCNCKHEEEEACWWQQQRRWWSWNNASVLHRRRAWSQDISKCCSYHEHWFHCFCSCSSCHG

SEQ ID NO: 2451 - DNA, 102 bp, Arabidopsis thaliana
  source 1..102: mol_type = genomic DNA
tagctccaaaagaggaaaacgaatccaagaaggagaaaaagtctcattcctcaagctccgcatcattcctccttcatggggtctctgcatcttacaatttag

SEQ ID NO: 2452 - protein, 32 aa, Arabidopsis thaliana
LQKRKTNPRRRKSLIPQAPHHSSFMGSLHLTI

SEQ ID NO: 2453 - DNA, 153 bp, Arabidopsis thaliana
  source 1..153: mol_type = genomic DNA
tgaaatttcttgttagctccaaaagaggaaaacgaatccaagaaggagaaaaagtctcattcctcaagctccgcatcattcctccttcatggggtctctgcatcttacaatttagcactctcatattattattccttaaaccccttgttttga

SEQ ID NO: 2454 - protein, 49 aa, Arabidopsis thaliana
NFLLAPKEENESKKEKKSHSSSSASFLLHGVSASYNLALSYYYSLNPLF

SEQ ID NO: 2455 - DNA, 99 bp, Arabidopsis thaliana
  source 1..99: mol_type = genomic DNA
taaatatgtttttgtatatatacacagagagttttgattaaggaagaaaaatccttagatcattttttttttgttatctttgtttcgtttttctggtag

SEQ ID NO: 2456 - protein, 31 aa, Arabidopsis thaliana
ICFCIYTQRVLIKEEKSLDHFFFVIFVSFFW

SEQ ID NO: 2457 - DNA, 99 bp, Arabidopsis thaliana; identical to SEQ ID NO: 2455
  source 1..99: mol_type = genomic DNA

SEQ ID NO: 2458 - protein, 31 aa, Arabidopsis thaliana; identical to SEQ ID NO: 2456

SEQ ID NO: 2459 - DNA, 78 bp, Arabidopsis thaliana
  source 1..78: mol_type = genomic DNA
tagatcattttttttttgttatctttgtttcgtttttctggtagaagagagaagaaggagagacgaattggcagctaa

SEQ ID NO: 2460 - protein, 24 aa, Arabidopsis thaliana
IIFFLLSLFRFSGRREKKERRIGS

SEQ ID NO: 2461 - DNA, 75 bp, Arabidopsis thaliana
  source 1..75: mol_type = genomic DNA
tagaagagagaagaaggagagacgaattggcagctaagcgattctctctctttctctctttctcttctcgtgtaa

SEQ ID NO: 2462 - protein, 23 aa, Arabidopsis thaliana
KREEGETNWQLSDSLSFSLSLLV

SEQ ID NO: 2463 - DNA, 102 bp, Arabidopsis thaliana
  source 1..102: mol_type = genomic DNA
taaaattctctctttgattcctatcttcttctctttattttcactttgtgctttctctgtctctcctattatgagtctaaaagtctactagctgttcaatag

SEQ ID NO: 2464 - protein, 32 aa, Arabidopsis thaliana
NSLFDSYLLLFIFTLCFLCLSYYESKSLLAVQ

SEQ ID NO: 2465 - DNA, 147 bp, Arabidopsis thaliana
  source 1..147: mol_type = genomic DNA
tagacgacgttaaaaccagaccagaccaaatacatttatcatttttcccttttttctaaaattctctctttgattcctatcttcttctctttattttcactttgtgctttctctgtctctcctattatgagtctaaaagtctactag

SEQ ID NO: 2466 - protein, 47 aa, Arabidopsis thaliana
TTLKPDQTKYIYHFSLFSKILSLIPIFFSLFSLCAFSVSPIMSLKVY

SEQ ID NO: 2467 - DNA, 78 bp, Arabidopsis thaliana
  source 1..78: mol_type = genomic DNA
tgagaaagcttattcacacttcatttctttgcttttggtgagagaatgaaacagagaagaagagatgaagaaaattaa

SEQ ID NO: 2468 - protein, 24 aa, Arabidopsis thaliana
ESLFTLHFFAFGERMKQRRRDEEN

SEQ ID NO: 2469 - DNA, 309 bp, Arabidopsis thaliana
  source 1..309: mol_type = genomic DNA
tagcttcgtaatcacagaaagagctctgaatcaaaaagctccaaatttcaagttacccgcaacgatctctcgagcaaagacggtaattttgggagaacttttggaataatcaagaggaactatgaaccggtggtcacgcagtcggagctccggcaccgaaaaccacttcccagtaacatgctccgacttcgattccccagctacatcgacgtaaaccgatcccgcttcagccatggaggtgattacacgacaaaatctccggcgacggtagaaatcaatcaaacccggaacagaaccagacaatcttga

SEQ ID NO: 2470 - protein, 101 aa, Arabidopsis thaliana
LRNHRKSSESKSSKFQVTRNDLSSKDGNFGRTFGIIKRNYEPVVTQSELRHRKPLPSNMLRLRFPSYIDVNRSRFSHGGDYTTKSPATVEINQTRNRTRQS

SEQ ID NO: 2471 - DNA, 78 bp, Arabidopsis thaliana
  source 1..78: mol_type = genomic DNA
tgattacacgacaaaatctccggcgacggtagaaatcaatcaaacccggaacagaaccagacaatcttgatggagtag

SEQ ID NO: 2472 - protein, 24 aa, Arabidopsis thaliana
LHDKISGDGRNQSNPEQNQTILME

SEQ ID NO: 2473 - DNA, 90 bp, Arabidopsis thaliana
  source 1..90: mol_type = genomic DNA
taacctctttcttcaccatcaaatgtcaaccgccaccctcgtcgtcttccctcctccacctcctgtccctatccctacctatataactag

SEQ ID NO: 2474 - protein, 28 aa, Arabidopsis thaliana
PLSSPSNVNRHPRRLPSSTSCPYPYLYN

SEQ ID NO: 2475 - DNA, 138 bp, Arabidopsis thaliana
  source 1..138: mol_type = genomic DNA
taaaaaccagatttttctcaatctcaatctctctcgctctcgctctcgttttctttgatgaacccttttacttcattcttactcttgataaatccaaattcccgagaaacccatttcatttccttcttctgtttctag

SEQ ID NO: 2476 - protein, 44 aa, Arabidopsis thaliana
KPDFSQSQSLSLSLSFSLMNPFTSFLLLINPNSRETHFISFFCF

SEQ ID NO: 2477 - DNA, 72 bp, Arabidopsis thaliana
  source 1..72: mol_type = genomic DNA
taaatccaaattcccgagaaacccatttcatttccttcttctgtttctagaaagacctcttcttttcgataa

SEQ ID NO: 2478 - protein, 22 aa, Arabidopsis thaliana
IQIPEKPISFPSSVSRKTSSFR

SEQ ID NO: 2479 - DNA, 129 bp, Arabidopsis thaliana
  source 1..129: mol_type = genomic DNA
taagtcggagtggttagctttctgggagagttgtggtgggttggtgcgacggcggagataggtgcagatggaaaccggaatcttccagctgcgtttctcgatccgtcgtctgcggccgcaaagctgtga

SEQ ID NO: 2480 - protein, 41 aa, Arabidopsis thaliana
VGVVSFLGELWWVGATAEIGADGNRNLPAAFLDPSSAAAKL

SEQ ID NO: 2481 - DNA, 153 bp, Arabidopsis thaliana
  source 1..153: mol_type = genomic DNA
taagattcattgtacgtattcaaatctacatttctttgccattgttggaatctccgcctcgatcgtttcttatcaaaggatctggtattcgatttttgctatcgtttcaaagcatggtctaatgatgatcctgatctccgactgatccaataa

SEQ ID NO: 2482 - protein, 49 aa, Arabidopsis thaliana
DSLYVFKSTFLCHCWNLRLDRFLSKDLVFDFCYRFKAWSNDDPDLRLIQ

SEQ ID NO: 2483 - DNA, 168 bp, Arabidopsis thaliana
  source 1..168: mol_type = genomic DNA
tgactctttgtaaccttctcgtttaagattcattgtacgtattcaaatctacatttctttgccattgttggaatctccgcctcgatcgtttcttatcaaaggatctggtattcgatttttgctatcgtttcaaagcatggtctaatgatgatcctgatctccgactga

SEQ ID NO: 2484 - protein, 54 aa, Arabidopsis thaliana
LFVTFSFKIHCTYSNLHFFAIVGISASIVSYQRIWYSIFAIVSKHGLMMILISD

SEQ ID NO: 2485 - DNA, 132 bp, Arabidopsis thaliana
  source 1..132: mol_type = genomic DNA
tgaattacgttctgcaatcaatacggacataaccgtccgttgtgtcctgtttataaagttttgctttttttattttctccattgatgggtcttttctttcttctctctctcgtgtttctttcatggggttaa

SEQ ID NO: 2486 - protein, 42 aa, Arabidopsis thaliana
ITFCNQYGHNRPLCPVYKVLLFLFSPLMGLFFLLSLVFLSWG

SEQ ID NO: 2487 - DNA, 291 bp, Arabidopsis thaliana
  source 1..291: mol_type = genomic DNA
tagcttctccctgactcttacgctctctctctctctctctctctctttttatctctctactcacataaatatatacatgtgtgtgtatgcatgtttatatgtatgtatgaaaccagtagtggttatacagatagtctatatagagatatcaatatgatgtgttttaatttagactttttatatatccgtttgaaacttccgaagttctcgaatggagttaagaaagttttgttctctacaagttcaatttttcttgtcattaattataaaactctgataactaatggataa

SEQ ID NO: 2488 - protein, 95 aa, Arabidopsis thaliana
LLPDSYALSLSLSLFLSLYSHKYIHVCVCMFICMYETSSGYTDSLYRDINMMCFNLDFLYIRLKLPKFSNGVKKVLFSTSSIFLVINYKTLITNG

SEQ ID NO: 2489 - DNA, 117 bp, Arabidopsis thaliana
  source 1..117: mol_type = genomic DNA
tagttacttgttcttctacagtacatcatcaaaagtcaaaaccatggactcgagatgttttggcttcttctttactttgttatctctaaatgtgattgttcttgcttacgatcctga

SEQ ID NO: 2490 - protein, 37 aa, Arabidopsis thaliana
LLVLLQYIIKSQNHGLEMFWLLLYFVISKCDCSCLRS

SEQ ID NO: 2491 - DNA, 237 bp, Arabidopsis thaliana
  source 1..237: mol_type = genomic DNA
tgaaggaccgactctctgaagcgaaaccgtagacgcgggaagctttttggaaaatggaggtggaggaagccaagatcttgctcggctttcctcctaattctcgtcccgatccttctcaggttaaagctgcttacaggaagaaagtatgggaatcacatcctgacttatttcctgatgatcagaagcttgttgccgagtctaagttcaaatcgatatctgaagcttattcttgcctag

SEQ ID NO: 2492 - protein, 77 aa, Arabidopsis thaliana
RTDSLKRNRRRGKLFGKWRWRKPRSCSAFLLILVPILLRLKLLTGRKYGNHILTYFLMIRSLLPSLSSNRYLKLILA

SEQ ID NO: 2493 - DNA, 66 bp, Arabidopsis thaliana
  source 1..66: mol_type = genomic DNA
tgagaatgttctctaatatgggtttcaagtagtctccttttcgtgtctccctcatatcgggtttaa

SEQ ID NO: 2494 - protein, 20 aa, Arabidopsis thaliana
ECSLIWVSSSLLFVSPSYRV

SEQ ID NO: 2495 - DNA, 90 bp, Arabidopsis thaliana
  source 1..90: mol_type = genomic DNA
tagctcttattgtctggatttttgtgcatttttcttctatcccctaaacttgtagtattgagaatgttctctaatatgggtttcaagtag

SEQ ID NO: 2496 - protein, 28 aa, Arabidopsis thaliana
LLLSGFLCIFLLSPKLVVLRMFSNMGFK

SEQ ID NO: 2497 - DNA, 66 bp, Arabidopsis thaliana
  source 1..66: mol_type = genomic DNA
taatatgggtttcaagtagtctccttttcgtgtctccctcatatcgggtttaaactcatcttctaa

SEQ ID NO: 2498 - protein, 20 aa, Arabidopsis thaliana
YGFQVVSFSCLPHIGFKLIF

SEQ ID NO: 2499 - DNA, 204 bp, Arabidopsis thaliana
  source 1..204: mol_type = genomic DNA
tgagaagaaatggcaggacacaaggttgcgcatgccacattgaaaggcccgagtgttgtcaaggaattgattattggtttgacgcttggtttagctgctggtggtctctggaagatgcaccattggaatgagcagaggaaaactagaactttctatgatttgcttgagagaggtgagatcggtgttgtcgcctctgaagagtga

SEQ ID NO: 2500 - protein, 66 aa, Arabidopsis thaliana
EEMAGHKVAHATLKGPSVVKELIIGLTLGLAAGGLWKMHHWNEQRKTRTFYDLLERGEIGVVASEE

SEQ ID NO: 2501 - DNA, 204 bp, Arabidopsis thaliana; identical to SEQ ID NO: 2499
  source 1..204: mol_type = genomic DNA

SEQ ID NO: 2502 - protein, 66 aa, Arabidopsis thaliana; identical to SEQ ID NO: 2500

SEQ ID NO: 2503 - DNA, 99 bp, Arabidopsis thaliana
  source 1..99: mol_type = genomic DNA
tgaatctatgagctactcaatcctgtttcgtcggattcgaattctacactctttctccgtcgtttacctctactacacctacgttttctcatgaagtaa

SEQ ID NO: 2504 - protein, 31 aa, Arabidopsis thaliana
IYELLNPVSSDSNSTLFLRRLPLLHLRFLMK

SEQ ID NO: 2505 - DNA, 120 bp, Arabidopsis thaliana
  source 1..120: mol_type = genomic DNA
tgagctactcaatcctgtttcgtcggattcgaattctacactctttctccgtcgtttacctctactacacctacgttttctcatgaagtaatcgttctcgatctcagttttcgtttttga

SEQ ID NO: 2506 - protein, 38 aa, Arabidopsis thaliana
ATQSCFVGFEFYTLSPSFTSTTPTFSHEVIVLDLSFRF

SEQ ID NO: 2507 - DNA, 117 bp, Arabidopsis thaliana
  source 1..117: mol_type = genomic DNA
tgaaaaaaaaacaaaattaggaatgaatctatgagctactcaatcctgtttcgtcggattcgaattctacactctttctccgtcgtttacctctactacacctacgttttctcatga

SEQ ID NO: 2508 - protein, 37 aa, Arabidopsis thaliana
KKNKIRNESMSYSILFRRIRILHSFSVVYLYYTYVFS

SEQ ID NO: 2509 - DNA, 99 bp, Arabidopsis thaliana; identical to SEQ ID NO: 2503
  source 1..99: mol_type = genomic DNA

SEQ ID NO: 2510 - protein, 31 aa, Arabidopsis thaliana; identical to SEQ ID NO: 2504

SEQ ID NO: 2511 - DNA, 120 bp, Arabidopsis thaliana
  source 1..120: mol_type = genomic DNA
taaagagaaatcgaaggaattagtcttttcacccatttttctctctctgtgtggcttcttcttcttcttcttcttcctatcaaaatcatcatcatcatcttctctatattactaaaatag

SEQ ID NO: 2512 - protein, 38 aa, Arabidopsis thaliana
REIEGISLFTHFSLSVWLLLLLLLPIKIIIIIFSILLK

SEQ ID NO: 2513 - DNA, 132 bp, Arabidopsis thaliana
  source 1..132: mol_type = genomic DNA
tagtcttttcacccatttttctctctctgtgtggcttcttcttcttcttcttcttcctatcaaaatcatcatcatcatcttctctatattactaaaatagagagagccaacaaaagagaggagagggcgtaa

SEQ ID NO: 2514 - protein, 42 aa, Arabidopsis thaliana
SFHPFFSLCVASSSSSSSYQNHHHHLLYITKIERANKREERA

SEQ ID NO: 2515 - DNA, 69 bp, Arabidopsis thaliana
  source 1..69: mol_type = genomic DNA
taaacaaatagacgatgcagagagcaaatgatgatgacaacaagagagggttttttcggcggcttttaa

SEQ ID NO: 2516 - protein, 21 aa, Arabidopsis thaliana
TNRRCREQMMMTTREGFFGGF

SEQ ID NO: 2517 - DNA, 102 bp, Arabidopsis thaliana
  source 1..102: mol_type = genomic DNA
tgatttaggcatttgatattttgtaaacaaaattttttggtttatttttggggagtggtggtaatacacactaatatgcatttctgtcacctggagagatga

SEQ ID NO: 2518 - protein, 32 aa, Arabidopsis thaliana
FRHLIFCKQNFLVYFWGVVVIHTNMHFCHLER

SEQ ID NO: 2519 - DNA, 84 bp, Arabidopsis thaliana
  source 1..84: mol_type = genomic DNA
taaagcatcattgcctcccattatcgtcacgcacgcagatcaatgattctctcactctgcttctcattcacgcttcttctttga

SEQ ID NO: 2520 - protein, 26 aa, Arabidopsis thaliana
SIIASHYRHARRSMILSLCFSFTLLL

SEQ ID NO: 2521 - DNA, 84 bp, Arabidopsis thaliana; identical to SEQ ID NO: 2519
  source 1..84: mol_type = genomic DNA

SEQ ID NO: 2522 - protein, 26 aa, Arabidopsis thaliana
SIIASHYRHARRSMILSLCFSFTLLL

SEQ ID NO: 2523 - DNA, 63 bp, Arabidopsis thaliana
  source 1..63: mol_type = genomic DNA
tagatattttctcttacgcagactcattgctttcctctctccatggaagctactgagttatga

SEQ ID NO: 2524 - protein, 19 aa, Arabidopsis thaliana
IFSLTQTHCFPLSMEATEL

SEQ ID NO: 2525 - DNA, 231 bp, Arabidopsis thaliana
  source 1..231: mol_type = genomic DNA
tagcaatttttgttggtgataattagaaaatgcaaattgagaaagttaccgggtcgtctgtaccgacccgatacaggaaaaaacgggtacaaatcggatttaatattacatttctttaaaaacgggtcggacccacagttttataagcaagaaagagagagagagagagatgcagaagaagaagaagaagaagaagaagctgtggagagagagagagagagagtcatatga

SEQ ID NO: 2526 - protein, 75 aa, Arabidopsis thaliana
QFLLVIIRKCKLRKLPGRLYRPDTGKNGYKSDLILHFFKNGSDPQFYKQERERERDAEEEEEEEEAVERERERVI

SEQ ID NO: 2527 - DNA, 108 bp, Arabidopsis thaliana
  source 1..108: mol_type = genomic DNA
tagacggagggcttgcaacggagttcgagagacatggagcagatctcaacgatcctctctggagcgccaaatgccttgtcacctctcctcacctcattcacaccgtaa

SEQ ID NO: 2528 - protein, 34 aa, Arabidopsis thaliana
TEGLQRSSRDMEQISTILSGAPNALSPLLTSFTP

SEQ ID NO: 2529 - DNA, 162 bp, Arabidopsis thaliana
  source 1..162: mol_type = genomic DNA
taactcgatgaaagatttcctgaagcagacaggcggctatgcggtaatagacggagggcttgcaacggagttcgagagacatggagcagatctcaacgatcctctctggagcgccaaatgccttgtcacctctcctcacctcattcacaccgtaagcagtaa

SEQ ID NO: 2530 - protein, 52 aa, Arabidopsis thaliana
LDERFPEADRRLCGNRRRACNGVRETWSRSQRSSLERQMPCHLSSPHSHRKQ

SEQ ID NO: 2531 - DNA, 84 bp, Arabidopsis thaliana
  source 1..84: mol_type = genomic DNA
tgatttttgcaagcagaggaggaagaagaagaagtagaaagaagcttaggtatggagtggagtggtacactggtactagagtga

SEQ ID NO: 2532 - protein, 26 aa, Arabidopsis thaliana
FLQAEEEEEEVERSLGMEWSGTLVLE

SEQ ID NO: 2533 - DNA, 72 bp, Arabidopsis thaliana
  source 1..72: mol_type = genomic DNA
tgattggaacatgataagctgctccgtttctcatatccacttttgttcaatttatttcaatttgatcgataa

SEQ ID NO: 2534 - protein, 22 aa, Arabidopsis thaliana
LEHDKLLRFSYPLLFNLFQFDR

SEQ ID NO: 2535 - DNA, 51 bp, Arabidopsis thaliana
  source 1..51: mol_type = genomic DNA
taagctgctccgtttctcatatccacttttgttcaatttatttcaatttga

SEQ ID NO: 2536 - protein, 15 aa, Arabidopsis thaliana
AAPFLISTFVQFISI

SEQ ID NO: 2537 - DNA, 132 bp, Arabidopsis thaliana
  source 1..132: mol_type = genomic DNA
tgatctgaagcgtctctgcaaaagagaaaagagagcagagaattcaaaccagtttccatcgacgcaacgaccaatctccacgattcctctcttctctctaacttccaggtacgtttttcgagaacccaatga

SEQ ID NO: 2538 - protein, 42 aa, Arabidopsis thaliana
SEASLQKRKESREFKPVSIDATTNLHDSSLLSNFQVRFSRTQ

SEQ ID NO: 2539 - DNA, 60 bp, Arabidopsis thaliana
  source 1..60: mol_type = genomic DNA
tagagaaacaaaaatcttttcaatttgatgatcttcccttattattcggagagcctataa

SEQ ID NO: 2540 - protein, 18 aa, Arabidopsis thaliana
RNKNLFNLMIFPYYSESL

SEQ ID NO: 2541 - DNA, 60 bp, Arabidopsis thaliana
  source 1..60: mol_type = genomic DNA
tgaaggaagctgctcctgaagctattaagaagcagaagacatcggaagttgagcatgtga

SEQ ID NO: 2542 - protein, 18 aa, Arabidopsis thaliana
RKLLLKLLRSRRHRKLSM

SEQ ID NO: 2543 - DNA, 138 bp, Arabidopsis thaliana
  source 1..138: mol_type = genomic DNA
taaatcaagaaaaagactccatgtcgagcatgtccatgtcgtcctcctcagctccagcttttccaccggaccacttctcatctacggaccagctctgttacgtccattgcagcttctgcgacactgtccttgctgtaa

SEQ ID NO: 2544 - protein, 44 aa, Arabidopsis thaliana
IKKKTPCRACPCRPPQLQLFHRTTSHLRTSSVTSIAASATLSLL

SEQ ID NO: 2545 - DNA, 111 bp, Arabidopsis thaliana
  source 1..111: mol_type = genomic DNA
taagaagcttctcatcttctctttctctcgaaaattccgatttgctcttttgaaacttccgatgacgaagaaactcgatccaccaacggcaccttcaagcgacgaagatga

SEQ ID NO: 2546 - protein, 35 aa, Arabidopsis thaliana
EASHLLFLSKIPICSFETSDDEETRSTNGTFKRRR

SEQ ID NO: 2547 - DNA, 132 bp, Arabidopsis thaliana
  source 1..132: mol_type = genomic DNA
tgattacggaagcttgggggggtttttatcagacagaacctggaaaagttgtcagatgaaacaatgtggcttggagattggatcatcaacttttcctctgttttcaactttataagctatcattttgcttaa

SEQ ID NO: 2548 - protein, 42 aa, Arabidopsis thaliana
LRKLGGVFIRQNLEKLSDETMWLGDWIINFSSVFNFISYHFA

SEQ ID NO: 2549 - DNA, 258 bp, Arabidopsis thaliana
  source 1..258: mol_type = genomic DNA
taagctatcattttgcttaatcttcttcattctcttctctcggccttggctttgaagaaatctcaattttcttcttcttcttcttctaccgttttgtccggcgatcagagctggttcaggagaaaccttaagtcttggtatcaaaagaaagaaagttttggaatttacctctgctgctgcaacttgcaacactttttttatatatattggatttttctatggctttgctcaaacgtaagcaaagcagatgaaatctag

SEQ ID NO: 2550 - protein, 84 aa, Arabidopsis thaliana
AIILLNLLHSLLSALALKKSQFSSSSSSTVLSGDQSWFRRNLKSWYQKKESFGIYLCCCNLQHFFYIYWIFLWLCSNVSKADEI

SEQ ID NO: 2551 - DNA, 123 bp, Arabidopsis thaliana
  source 1..123: mol_type = genomic DNA
taagtcttggtatcaaaagaaagaaagttttggaatttacctctgctgctgcaacttgcaacactttttttatatatattggatttttctatggctttgctcaaacgtaagcaaagcagatga

SEQ ID NO: 2552 - protein, 39 aa, Arabidopsis thaliana
VLVSKERKFWNLPLLLQLATLFLYILDFSMALLKRKQSR

SEQ ID NO: 2553 - DNA, 93 bp, Arabidopsis thaliana
  source 1..93: mol_type = genomic DNA
taatctttatctctctctttctcttgtttgtcaaaagatgcccaccaacacagaaatgaggaaaaaaagatctcttttttatttgaatgttga

SEQ ID NO: 2554 - protein, 29 aa, Arabidopsis thaliana
SLSLSFSCLSKDAHQHRNEEKKISFLFEC

SEQ ID NO: 2555 - DNA, 174 bp, Arabidopsis thaliana
  source 1..174: mol_type = genomic DNA
taaagatgcattttttatgatccttttttctccgcctttgttgttgatttgatcgtgtatgattacggaagcttgggggggtttttatcagacagaacctggaaaagttgtcagatgaaacaatgtggcttggagattggatcatcaacttttcctctgttttcaactttataa

SEQ ID NO: 2556 - protein, 56 aa, Arabidopsis thaliana
RCIFYDPFFSAFVVDLIVYDYGSLGGFLSDRTWKSCQMKQCGLEIGSSTFPLFSTL

SEQ ID NO: 2557 - DNA, 132 bp, Arabidopsis thaliana; identical to SEQ ID NO: 2547
  source 1..132: mol_type = genomic DNA

SEQ ID NO: 2558 - protein, 42 aa, Arabidopsis thaliana; identical to SEQ ID NO: 2548

SEQ ID NO: 2559 - DNA, 174 bp, Arabidopsis thaliana; identical to SEQ ID NO: 2555
  source 1..174: mol_type = genomic DNA

SEQ ID NO: 2560 - protein, 56 aa, Arabidopsis thaliana; identical to SEQ ID NO: 2556

SEQ ID NO: 2561 - DNA, 132 bp, Arabidopsis thaliana; identical to SEQ ID NO: 2547
  source 1..132: mol_type = genomic DNA

SEQ ID NO: 2562 - protein, 42 aa, Arabidopsis thaliana; identical to SEQ ID NO: 2548

SEQ ID NO: 2563 - DNA, 111 bp, Arabidopsis thaliana
  source 1..111: mol_type = genomic DNA
tgaaacaatgtggcttggagattggatcatcaacttttcctctgttttcaactttataagctatcattttgcttaatcttcttcattctcttctctcggccttggctttga

SEQ ID NO: 2564 - protein, 35 aa, Arabidopsis thaliana
NNVAWRLDHQLFLCFQLYKLSFCLIFFILFSRPWL

SEQ ID NO: 2565 - DNA, 60 bp, Arabidopsis thaliana
  source 1..60: mol_type = genomic DNA
tgatccgaccagcttatgattattctgtctttattcttagagcctcttgatccacactga

SEQ ID NO: 2566 - protein, 18 aa, Arabidopsis thaliana
SDQLMIILSLFLEPLDPH

SEQ ID NO: 2567 - DNA, 60 bp, Arabidopsis thaliana; identical to SEQ ID NO: 2565
  source 1..60: mol_type = genomic DNA

SEQ ID NO: 2568 - protein, 18 aa, Arabidopsis thaliana
SDQLMIILSLFLEPLDPH

SEQ ID NO: 2569 - DNA, 60 bp, Arabidopsis thaliana
  source 1..60: mol_type = genomic DNA
taaacaatgaaacgaagaagatcttccgagaatattctctccttctcacgcataccctag

SEQ ID NO: 2570 - protein, 18 aa, Arabidopsis thaliana
TMKRRRSSENILSFSRIP

SEQ ID NO: 2571 - DNA, 114 bp, Arabidopsis thaliana
  source 1..114: mol_type = genomic DNA
taaaattattgtaaagcacgtggatttgcttgtcttggttttgttttctccttcgacctctttgatgaaatcgaggaacctacaatttcttcgtcgatccaaatggtagcttag

SEQ ID NO: 2572 - protein, 36 aa, Arabidopsis thaliana
NYCKARGFACLGFVFSFDLFDEIEEPTISSSIQMVA

SEQ ID NO: 2573 - DNA, 78 bp, Arabidopsis thaliana
  source 1..78: mol_type = genomic DNA
tgaaatcgaggaacctacaatttcttcgtcgatccaaatggtagcttagtggtggtgataataggtttctcctcttga

SEQ ID NO: 2574 - protein, 24 aa, Arabidopsis thaliana
NRGTYNFFVDPNGSLVVVIIGFSS

SEQ ID NO: 2575 - DNA, 153 bp, Arabidopsis thaliana
  source 1..153: mol_type = genomic DNA
tgaaagacaataagagagagagacacacacaccaaaaaaaaaaccccattgatttttaagagagagagagagactgagaacgaagagcaaatgagagagaagttgaatcaaatttccgctttcgttctctttctctctcctccatttcagtaa

SEQ ID NO: 2576 - protein, 49 aa, Arabidopsis thaliana
KTIRERDTHTKKKTPLIFKRERETENEEQMREKLNQISAFVLFLSPPFQ

SEQ ID NO: 2577 - DNA, 72 bp, Arabidopsis thaliana
  source 1..72: mol_type = genomic DNA
tgagtttcttatgtttacaggaaggtgatgaatgttgagatcgattcaatcaacgttcaacgaagatggtga

SEQ ID NO: 2578 - protein, 22 aa, Arabidopsis thaliana
VSYVYRKVMNVEIDSINVQRRW

SEQ ID NO: 2579 - DNA, 51 bp, Arabidopsis thaliana
  source 1..51: mol_type = genomic DNA
taacataataatgttaattgttgcttaaaccttccagctcaagtttggtag

SEQ ID NO: 2580 - protein, 15 aa, Arabidopsis thaliana
HNNVNCCLNLPAQVW

SEQ ID NO: 2581 - DNA, 57 bp, Arabidopsis thaliana
  source 1..57: mol_type = genomic DNA
taagctcacaagaatctacgcatctgtactgttattatgctgatgctctctacttaa

SEQ ID NO: 2582 - protein, 17 aa, Arabidopsis thaliana
AHKNLRICTVIMLMLST

SEQ ID NO: 2583 - DNA, 51 bp, Arabidopsis thaliana
  source 1..51: mol_type = genomic DNA
tagatcctgatgaagttgcgtggtggtgaatcgtggtttaagttttgctag

SEQ ID NO: 2584 - protein, 15 aa, Arabidopsis thaliana
ILMKLRGGESWFKFC

SEQ ID NO: 2585 - DNA, 51 bp, Arabidopsis thaliana; identical to SEQ ID NO: 2583
  source 1..51: mol_type = genomic DNA

SEQ ID NO: 2586 - protein, 15 aa, Arabidopsis thaliana
ILMKLRGGESWFKFC

SEQ ID NO: 2587 - DNA, 108 bp, Arabidopsis thaliana
  source 1..108: mol_type = genomic DNA
tgaaaatcgttggtgacgatggcggattctctttctagggtttacggaactctgtttagtggtgttaatatatctctcttctcggatccaccgttgaaaaccccctga

SEQ ID NO: 2588 - protein, 34 aa, Arabidopsis thaliana
KSLVTMADSLSRVYGTLFSGVNISLFSDPPLKTP

SEQ ID NO: 2589 - DNA, 84 bp, Arabidopsis thaliana
  source 1..84: mol_type = genomic DNA
tgacgatggcggattctctttctagggtttacggaactctgtttagtggtgttaatatatctctcttctcggatccaccgttga

SEQ ID NO: 2590 - protein, 26 aa, Arabidopsis thaliana
RWRILFLGFTELCLVVLIYLSSRIHR

SEQ ID NO: 2591 - DNA, 162 bp, Arabidopsis thaliana
  source 1..162: mol_type = genomic DNA
tgaagatcctcgaaacattttggactgaagacaatgaagaagaaggcaacgacgagaatcatgctccacaatctggtttccagttcggaagcaccaatgttcctcctggtcaattcaactttatttgaaagacaacaagaacaacaacatagccagatataa

SEQ ID NO: 2592 - protein, 52 aa, Arabidopsis thaliana
RSSKHFGLKTMKKKATTRIMLHNLVSSSEAPMFLLVNSTLFERQQEQQHSQI

SEQ ID NO: 2593 - DNA, 60 bp, Arabidopsis thaliana
  source 1..60: mol_type = genomic DNA
taaatcatcaatggcggattcgtctcagaagaaaatcagaagaaacgcgataacacataa

SEQ ID NO: 2594 - protein, 18 aa, Arabidopsis thaliana
IINGGFVSEENQKKRDNT

SEQ ID NO: 2595 - DNA, 54 bp, Arabidopsis thaliana
  source 1..54: mol_type = genomic DNA
tgaaggaatggatcaatatgggattccagtagagagaaaagagatgaagcataa

SEQ ID NO: 2596 - protein, 16 aa, Arabidopsis thaliana
RNGSIWDSSREKRDEA

SEQ ID NO: 2597 - DNA, 63 bp, Arabidopsis thaliana
  source 1..63: mol_type = genomic DNA
taggtctcgtctctctttctctctattttacgcttttttcctgaacgattcttagggttttga

SEQ ID NO: 2598 - protein, 19 aa, Arabidopsis thaliana
VSSLFLSILRFFPERFLGF

SEQ ID NO: 2599 - DNA, 132 bp, Arabidopsis thaliana
  source 1..132: mol_type = genomic DNA
taagcaaaactctcttcacaacgtaaaaagcagaaacagagcttaaacaccaaaagagagagaaagagatctagaagaagaagatggcatgagatatgcgaagaagatggagaagtgttagttatacactag

SEQ ID NO: 2600 - protein, 42 aa, Arabidopsis thaliana
AKLSSQRKKQKQSLNTKRERKRSRRRRWHEICEEDGEVLVIH

SEQ ID NO: 2601 - DNA, 78 bp, Arabidopsis thaliana
  source 1..78: mol_type = genomic DNA
taaacaccaaaagagagagaaagagatctagaagaagaagatggcatgagatatgcgaagaagatggagaagtgttag

SEQ ID NO: 2602 - protein, 24 aa, Arabidopsis thaliana
TPKERERDLEEEDGMRYAKKMEKC

SEQ ID NO: 2603 - DNA, 54 bp, Arabidopsis thaliana
  source 1..54: mol_type = genomic DNA
tgagatatgcgaagaagatggagaagtgttagttatacactaggagaattgtaa

SEQ ID NO: 2604 - protein, 16 aa, Arabidopsis thaliana
DMRRRWRSVSYTLGEL

SEQ ID NO: 2605 - DNA, 111 bp, Arabidopsis thaliana
  source 1..111: mol_type = genomic DNA
tgatcgtatccactaattcggctcacgtcttctcgattttggcaacggtgctgtggaatcgcgttaccgttcaaaatttccatttcggctgatctcattatgaatatttag

SEQ ID NO: 2606 - protein, 35 aa, Arabidopsis thaliana
SYPLIRLTSSRFWQRCCGIALPFKISISADLIMNI

SEQ ID NO: 2607 - DNA, 201 bp, Arabidopsis thaliana
  source 1..201: mol_type = genomic DNA
tgacattcgtgtcatggacgctcccaatcccaagcgaccttgtcttgtgcctttgggtacctcctccatagaaaacccttgctccctccctattgctccagatttcaaccaaagcaacatcgatttgactatctcttctttcctttcgttgtcggacttgcctttgttctccttaccgctctccattggatgctcttttga

SEQ ID NO: 2608 - protein, 65 aa, Arabidopsis thaliana
HSCHGRSQSQATLSCAFGYLLHRKPLLPPYCSRFQPKQHRFDYLFFPFVVGLAFVLLTALHWMLF

SEQ ID NO: 2609 - DNA, 129 bp, Arabidopsis thaliana
  source 1..129: mol_type = genomic DNA
taatatatatatatatatattcatcaatccctatctctcatcgaattctcttccgatcgtctttttttcttcccgcggtttcttgcgtttccggtcagtttgcggcaccgtgttttgttatttggttga

SEQ ID NO: 2610 - protein, 41 aa, Arabidopsis thaliana
YIYIYIHQSLSLIEFSSDRLFFFPRFLAFPVSLRHRVLLFG

SEQ ID NO: 2611 - DNA, 60 bp, Arabidopsis thaliana
  source 1..60: mol_type = genomic DNA
tagatttcactgcttttgattttcgtatcttcttctctgtcacataacctaacactataa

SEQ ID NO: 2612 - protein, 18 aa, Arabidopsis thaliana
ISLLLIFVSSSLSHNLTL

SEQ ID NO: 2613 - DNA, 51 bp, Arabidopsis thaliana
  source 1..51: mol_type = genomic DNA
tagccgctgaacacagtccttatcttcttcaacacgcgcataatccggtga

SEQ ID NO: 2614 - protein, 15 aa, Arabidopsis thaliana
PLNTVLIFFNTRIIR

SEQ ID NO: 2615 - DNA, 120 bp, Arabidopsis thaliana
  source 1..120: mol_type = genomic DNA
tgaaaatggcgtctcactcttcgactctcttcacttctccttcttccttcattctcttctcttctcatcgtctcaaatcttctccgaattacttcacttaccactttcctcgttccgtaa

SEQ ID NO: 2616 - protein, 38 aa, Arabidopsis thaliana
KWRLTLRLSSLLLLPSFSSLLIVSNLLRITSLTTFLVP

SEQ ID NO: 2617 - DNA, 219 bp, Arabidopsis thaliana
  source 1..219: mol_type = genomic DNA
taattggggattaacaaagggactggggctttattaagctcgaaacaattgttcttcactctggccgcttctgcaaagtcgtgtgcttctcgcacctctgcgcaggtgtggggtggccttgaagtggtgacttcactctgtcttccaaggatttctctagcttctatcatttggaggctccgtcgtgtttctgagggtcttacccttgattacggctaa

SEQ ID NO: 2618 - protein, 71 aa, Arabidopsis thaliana
LGINKGTGALLSSKQLFFTLAASAKSCASRTSAQVWGGLEVVTSLCLPRISLASIIWRLRRVSEGLTLDYG

SEQ ID NO: 2619 - DNA, 93 bp, Arabidopsis thaliana
  source 1..93: mol_type = genomic DNA
tagcttctatcatttggaggctccgtcgtgtttctgagggtcttacccttgattacggctaacatttactacgcccactataccacctcttaa

SEQ ID NO: 2620 - protein, 29 aa, Arabidopsis thaliana
LLSFGGSVVFLRVLPLITANIYYAHYTTS

SEQ ID NO: 2621 - DNA, 219 bp, Arabidopsis thaliana; identical to SEQ ID NO: 2617
  source 1..219: mol_type = genomic DNA

SEQ ID NO: 2622 - protein, 71 aa, Arabidopsis thaliana; identical to SEQ ID NO: 2618

SEQ ID NO: 2623 - DNA, 84 bp, Arabidopsis thaliana
  source 1..84: mol_type = genomic DNA
tagcgttttcggctaaagctttcgctgactactacaacaatggcgtcctcatccctttcccctgctactcaggttcactcttga

SEQ ID NO: 2624 - protein, 26 aa, Arabidopsis thaliana
RFRLKLSLTTTTMASSSLSPATQVHS

SEQ ID NO: 2625 - DNA, 153 bp, Arabidopsis thaliana
  source 1..153: mol_type = genomic DNA
tagatcttaaaccaaaacggtaggactcgaagcaactggtcctatggtctagtggtcaggacattggactctgaatccagtaacccgagttcaaatctcggtaggacctttgttttcggcttcggttttgagattgtgcaaaccggtttttaa

SEQ ID NO: 2626 - protein, 49 aa, Arabidopsis thaliana
ILNQNGRTRSNWSYGLVVRTLDSESSNPSSNLGRTFVFGFGFEIVQTGF

SEQ ID NO: 2627 - DNA, 105 bp, Arabidopsis thaliana
  source 1..105: mol_type = genomic DNA
taatttgatcacaacctaatcctatcaacatcgttaaccaaacaaagccaatacatttaccaaggatatacgtatgcatattgcaaagatcacccgattttatga

SEQ ID NO: 2628 - protein, 33 aa, Arabidopsis thaliana
FDHNLILSTSLTKQSQYIYQGYTYAYCKDHPIL

SEQ ID NO: 2629 - DNA, 54 bp, Arabidopsis thaliana
  source 1..54: mol_type = genomic DNA
taggactcgaagcaactggtcctatggtctagtggtcaggacattggactctga

SEQ ID NO: 2630 - protein, 16 aa, Arabidopsis thaliana
DSKQLVLWSSGQDIGL

SEQ ID NO: 2631 - DNA, 153 bp, Arabidopsis thaliana; identical to SEQ ID NO: 2625
  source 1..153: mol_type = genomic DNA

SEQ ID NO: 2632 - protein, 49 aa, Arabidopsis thaliana; identical to SEQ ID NO: 2626

SEQ ID NO: 2633 - DNA, 54 bp, Arabidopsis thaliana; identical to SEQ ID NO: 2629
  source 1..54: mol_type = genomic DNA

SEQ ID NO: 2634 - protein, 16 aa, Arabidopsis thaliana
DSKQLVLWSSGQDIGL

SEQ ID NO: 2635 - DNA, 195 bp, Arabidopsis thaliana
  source 1..195: mol_type = genomic DNA
tagaatggatcttcttcagctgctcctagattgacgatctcatactcgcatatccagaaaccatcctactctccctttgattttgatcctcggtgctttagccgttcgagaaagagagcaattttcacttccggtctcgtattcttcgggatctcggactcaatcatcgggaacaaggcgacttccgccgactga

SEQ ID NO: 2636 - protein, 63 aa, Arabidopsis thaliana
NGSSSAAPRLTISYSHIQKPSYSPFDFDPRCFSRSRKRAIFTSGLVFFGISDSIIGNKATSAD

SEQ ID NO: 2637 - DNA, 54 bp, Arabidopsis thaliana
  source 1..54: mol_type = genomic DNA
tagctcctatatacgtgcctttgcgtatgtataggtgttttctcatctctgtga

SEQ ID NO: 2638 - protein, 16 aa, Arabidopsis thaliana
LLYTCLCVCIGVFSSL

SEQ ID NO: 2639 - DNA, 165 bp, Arabidopsis thaliana
  source 1..165: mol_type = genomic DNA
taattcatagattactactatacaaaattctatataactataatctgttctcttgtgtgtttctcgcgtggcttgcgtgttacttcattcatcactgctttagcttctcctcatatgaatctcgaggcaatccagtcactgacttttctcactccccatctctag

SEQ ID NO: 2640 - protein, 53 aa, Arabidopsis thaliana
FIDYYYTKFYITIICSLVCFSRGLRVTSFITALASPHMNLEAIQSLTFLTPHL

SEQ ID NO: 2641 - DNA, 66 bp, Arabidopsis thaliana
  source 1..66: mol_type = genomic DNA
tgacttttctcactccccatctctagggtttctctctttcccttattttataatttatttcattga

SEQ ID NO: 2642 - protein, 20 aa, Arabidopsis thaliana
LFSLPISRVSLFPLFYNLFH

SEQ ID NO: 2643 - DNA, 105 bp, Arabidopsis thaliana
  source 1..105: mol_type = genomic DNA
tagatctcctttttctgggtttgttctcaaagatttgttctgtttcagttcttccaatttggggggattttatgttggatccagtctctaaaggttcgattttga

SEQ ID NO: 2644 - protein, 33 aa, Arabidopsis thaliana
ISFFWVCSQRFVLFQFFQFGGILCWIQSLKVRF

SEQ ID NO: 2645 - DNA, 72 bp, Arabidopsis thaliana
  source 1..72: mol_type = genomic DNA
taatgggttgtttcagcagtaaacaccggaaaactcaaaacgacggcggcggagaaagatcaattccgataa

SEQ ID NO: 2646 - protein, 22 aa, Arabidopsis thaliana
WVVSAVNTGKLKTTAAEKDQFR

SEQ ID NO: 2647 - DNA, 93 bp, Arabidopsis thaliana
  source 1..93: mol_type = genomic DNA
taaaccaaagatcattgtgaattagggtttcactgtgtctccaaaatggaagatatacttggagaagaaaatcaaatcacgaaaatatattga

SEQ ID NO: 2648 - protein, 29 aa, Arabidopsis thaliana
TKDHCELGFHCVSKMEDILGEENQITKIY

SEQ ID NO: 2649 - DNA, 225 bp, Arabidopsis thaliana
  source 1..225: mol_type = genomic DNA
tgattcaatcgtactcaaaactcacaaaggaaccacctttacccaaataaatcaatggatcatcaaaattatcaataccaaaatcctttcgagagacgacccatccttaaatccaaagctcctgctgtgaagtggatcaaagaatgggtaccacaagatattgttgctacaggtggaaagtgtcatctacacaaatgggtcacaggtgaaattgtgatgttttaa

SEQ ID NO: 2650 - protein, 73 aa, Arabidopsis thaliana
FNRTQNSQRNHLYPNKSMDHQNYQYQNPFERRPILKSKAPAVKWIKEWVPQDIVATGGKCHLHKWVTGEIVMF

SEQ ID NO: 2651 - DNA, 126 bp, Arabidopsis thaliana
  source 1..126: mol_type = genomic DNA
taattcgtagaaaacgaagcagagagaaaatgggaggcgaagatgataaagataagaaatggaatcctccaccaccgcagcagaagccggactcaaggccttgggaagtcctcgcggcttttgtaa

SEQ ID NO: 2652 - protein, 40 aa, Arabidopsis thaliana
FVENEAERKWEAKMIKIRNGILHHRSRSRTQGLGKSSRLL

SEQ ID NO: 2653 - DNA, 75 bp, Arabidopsis thaliana
  source 1..75: mol_type = genomic DNA
taaatcacaaataggttctgttttttgtgggaagatatgagattttcttcaagcaaaaagggagttatgagatga

SEQ ID NO: 2654 - protein, 23 aa, Arabidopsis thaliana
ITNRFCFLWEDMRFSSSKKGVMR

SEQ ID NO: 2655 - DNA, 132 bp, Arabidopsis thaliana
  source 1..132: mol_type = genomic DNA
tagctgtggttttgtggagttttagctctcagtgattgttttagttttagttccttaaacatgttttgttcatatgggtttgttagatctttgagttttcttcatttctttattatctctcttggatcttga

SEQ ID NO: 2656 - protein, 42 aa, Arabidopsis thaliana
LWFCGVLALSDCFSFSSLNMFCSYGFVRSLSFLHFFIISLGS

SEQ ID NO: 2657 - DNA, 54 bp, Arabidopsis thaliana
  source 1..54: mol_type = genomic DNA
tgagttttcttcatttctttattatctctcttggatcttgatacaaaagtatga

SEQ ID NO: 2658 - protein, 16 aa, Arabidopsis thaliana
VFFISLLSLLDLDTKV

SEQ ID NO: 2659 - DNA, 75 bp, Arabidopsis thaliana
  source 1..75: mol_type = genomic DNA
tgatctacaacatttgctctcgaacccctaattcatctccttacccaaagccaccgacttgggtttaagatctga

SEQ ID NO: 2660 - protein, 23 aa, Arabidopsis thaliana
STTFALEPLIHLLTQSHRLGFKI

SEQ ID NO: 2661 - DNA, 99 bp, Arabidopsis thaliana
  source 1..99: mol_type = genomic DNA
taaataatcggtcaaactctgcctcccaatccaaagtctaaaacctttccttcttctttctttacaaatccaacaatctcaatgtctccaaatccataa

SEQ ID NO: 2662 - protein, 31 aa, Arabidopsis thaliana
IIGQTLPPNPKSKTFPSSFFTNPTISMSPNP

SEQ ID NO: 2663 - DNA, 210 bp, Arabidopsis thaliana
  source 1..210: mol_type = genomic DNA
tagaagattgcaagatcgaaaatccctctggtgatcgcgggacgtcgaccgggagatgctgaagttgtatacgcctcgacggaaagagcagaaagtgaattgaattggaaggccaaatatgggattgaggagatgtgtagagatttgtggaactgggctagtaataatccttatggatatgattcctcttctgaagacaactctcattaa

SEQ ID NO: 2664 - protein, 68 aa, Arabidopsis thaliana
KIARSKIPLVIAGRRPGDAEVVYASTERAESELNWKAKYGIEEMCRDLWNWASNNPYGYDSSSEDNSH

SEQ ID NO: 2665 - DNA, 120 bp, Arabidopsis thaliana
  source 1..120: mol_type = genomic DNA
tgaattggaaggccaaatatgggattgaggagatgtgtagagatttgtggaactgggctagtaataatccttatggatatgattcctcttctgaagacaactctcattaacttttcttaa

SEQ ID NO: 2666 - protein, 38 aa, Arabidopsis thaliana
IGRPNMGLRRCVEICGTGLVIILMDMIPLLKTTLINFS

SEQ ID NO: 2667 - DNA, 66 bp, Arabidopsis thaliana
  source 1..66: mol_type = genomic DNA
tgagcaatttgggatctcgatcttctaccgacaaagagcttatcagcttctcaagatctttgttga

SEQ ID NO: 2668 - protein, 20 aa, Arabidopsis thaliana
AIWDLDLLPTKSLSASQDLC

SEQ ID NO: 2669 - DNA, 69 bp, Arabidopsis thaliana
  source 1..69: mol_type = genomic DNA
tagatttttgcacactcgaagagggaaataaagaaacaaaatgatgccttgatggagaaaactaattga

SEQ ID NO: 2670 - protein, 21 aa, Arabidopsis thaliana
IFAHSKREIKKQNDALMEKTN

SEQ ID NO: 2671 - DNA, 66 bp, Arabidopsis thaliana
  source 1..66: mol_type = genomic DNA
tagacttttagggttgttttacttgtgaagtttctctcttttctaatggattctctgggtaattga

SEQ ID NO: 2672 - protein, 20 aa, Arabidopsis thaliana
TFRVVLLVKFLSFLMDSLGN

SEQ ID NO: 2673 - DNA, 54 bp, Arabidopsis thaliana
  source 1..54: mol_type = genomic DNA
tagggttgttttacttgtgaagtttctctcttttctaatggattctctgggtaa

SEQ ID NO: 2674 - protein, 16 aa, Arabidopsis thaliana
GCFTCEVSLFSNGFSG

SEQ ID NO: 2675 - DNA, 66 bp, Arabidopsis thaliana
  source 1..66: mol_type = genomic DNA
tgactgacttcatcaattagagaattcgatttatttgatttagctggaaacagagatttaccttga

SEQ ID NO: 2676 - protein, 20 aa, Arabidopsis thaliana
LTSSIREFDLFDLAGNRDLP

SEQ ID NO: 2677 - DNA, 270 bp, Arabidopsis thaliana
  source 1..270: mol_type = genomic DNA
tagagagagagatttgtgtattcgatcgaatcaagcttgggtttgttagtaatggcgagaatagctatagttttagatctactgaagaaatctcaatccaagcacagtcttcactcatcttccttctcttccgccgccactgctccctttgcgtctaggtttctattcggttctttcgagcctcgagtttcgtatcgtggtgttgctgctggaatagacgatgattaccttggtgctatacggaaaatgtctgcggatggaaacttctaa

SEQ ID NO: 2678 - protein, 88 aa, Arabidopsis thaliana
RERFVYSIESSLGLLVMARIAIVLDLLKKSQSKHSLHSSSFSSAATAPFASRFLFGSFEPRVSYRGVAAGIDDDYLGAIRKMSADGNF

SEQ ID NO: 2679 - DNA, 63 bp, Arabidopsis thaliana
  source 1..63: mol_type = genomic DNA
tagacgatgattaccttggtgctatacggaaaatgtctgcggatggaaacttctaaagggtaa

SEQ ID NO: 2680 - protein, 19 aa, Arabidopsis thaliana
TMITLVLYGKCLRMETSKG

SEQ ID NO: 2681 - DNA, 63 bp, Arabidopsis thaliana
  source 1..63: mol_type = genomic DNA
tgaatcttgatctttcgattagtccccaccaagcaccaagtgatcgatcttttgtctcactga

SEQ ID NO: 2682 - protein, 19 aa, Arabidopsis thaliana
ILIFRLVPTKHQVIDLLSH

SEQ ID NO: 2683 - DNA, 270 bp, Arabidopsis thaliana; identical to SEQ ID NO: 2677
  source 1..270: mol_type = genomic DNA

SEQ ID NO: 2684 - protein, 88 aa, Arabidopsis thaliana; identical to SEQ ID NO: 2678

SEQ ID NO: 2685 - DNA, 63 bp, Arabidopsis thaliana; identical to SEQ ID NO: 2679
  source 1..63: mol_type = genomic DNA

SEQ ID NO: 2686 - protein, 19 aa, Arabidopsis thaliana
TMITLVLYGKCLRMETSKG

SEQ ID NO: 2687 - DNA, 123 bp, Arabidopsis thaliana
  source 1..123: mol_type = genomic DNA
tagattttctgcaatttctcgcaaacccatcacttgttcttcttcgaggacacagtgtcctgctccctttacccatggacgatcgatttctctcagacgaagacttaccttattgccccttaa

SEQ ID NO: 2688 - protein, 39 aa, Arabidopsis thaliana
IFCNFSQTHHLFFFEDTVSCSLYPWTIDFSQTKTYLIAP

SEQ ID NO: 2689 - DNA, 51 bp, Arabidopsis thaliana
  source 1..51: mol_type = genomic DNA
taaggatattcggaagaagcttttgaaatttttggcaaaggtctcatttga

SEQ ID NO: 2690 - protein, 15 aa, Arabidopsis thaliana
GYSEEAFEIFGKGLI

SEQ ID NO: 2691 - DNA, 69 bp, Arabidopsis thaliana
  source 1..69: mol_type = genomic DNA
tgacccttccttcttcctcaggaagatttaagatacttgttgataaggatattcggaagaagcttttga

SEQ ID NO: 2692 - protein, 21 aa, Arabidopsis thaliana
PFLLPQEDLRYLLIRIFGRSF

SEQ ID NO: 2693 - DNA, 75 bp, Arabidopsis thaliana
  source 1..75: mol_type = genomic DNA
taaaccctagatccacaatttcaacggaaatttcattcttcttcttcttcctcgcgaatctgtttttttttttga

SEQ ID NO: 2694 - protein, 23 aa, Arabidopsis thaliana
TLDPQFQRKFHSSSSSSRICFFF

SEQ ID NO: 2695 - DNA, 108 bp, Arabidopsis thaliana
  source 1..108: mol_type = genomic DNA
tagccgttctcttatgtctatatcactctctggctctcttctctttcttctatagcttctagtttctcccacttctcacttcctttttcccgaatcttgataatgtaa

SEQ ID NO: 2696 - protein, 34 aa, Arabidopsis thaliana
PFSYVYITLWLSSLSSIASSFSHFSLPFSRILIM

SEQ ID NO: 2697 - DNA, 108 bp, Arabidopsis thaliana; identical to SEQ ID NO: 2695
  source 1..108: mol_type = genomic DNA

SEQ ID NO: 2698 - protein, 34 aa, Arabidopsis thaliana; identical to SEQ ID NO: 2696

SEQ ID NO: 2699 - DNA, 93 bp, Arabidopsis thaliana
  source 1..93: mol_type = genomic DNA
taaaatcttactcttattcttcttcttctacctcctcctttcttccatttctctgcacttgattctctctctaaatgttggagacggctttaa

SEQ ID NO: 2700 - protein, 29 aa, Arabidopsis thaliana
NLTLILLLLPPPFFHFSALDSLSKCWRRL

SEQ ID NO: 2701 - DNA, 117 bp, Arabidopsis thaliana
  source 1..117: mol_type = genomic DNA
taaggatcgtgctctgtcttggttattagtggtgaagggtgttcaaaaatcagtgacttgctttgctcaattttcacaagaggtcatgcgtccatgagcaattggcataatacgtaa

SEQ ID NO: 2702 - protein, 37 aa, Arabidopsis thaliana
GSCSVLVISGEGCSKISDLLCSIFTRGHASMSNWHNT

SEQ ID NO: 2703 - DNA, 105 bp, Arabidopsis thaliana
  source 1..105: mol_type = genomic DNA
taattaatcagtcttatgatgagaagttggttcttgattacatactacaatcaagaagtaaacagtttatgcaatcttgtgacggttcttgtgttcaaagagtag

SEQ ID NO: 2704 - protein, 33 aa, Arabidopsis thaliana
LISLMMRSWFLITYYNQEVNSLCNLVTVLVFKE

SEQ ID NO: 2705 - DNA, 72 bp, Arabidopsis thaliana
  source 1..72: mol_type = genomic DNA
tgacccacaaaattcttaatcgttttattcaataaactgagaaacgaaatgattgttgtacagtatatataa

SEQ ID NO: 2706 - protein, 22 aa, Arabidopsis thaliana
PTKFLIVLFNKLRNEMIVVQYI

SEQ ID NO: 2707 - DNA, 72 bp, Arabidopsis thaliana; identical to SEQ ID NO: 2705
  source 1..72: mol_type = genomic DNA

SEQ ID NO: 2708 - protein, 22 aa, Arabidopsis thaliana
PTKFLIVLFNKLRNEMIVVQYI

SEQ ID NO: 2709 - DNA, 72 bp, Arabidopsis thaliana; identical to SEQ ID NO: 2705
  source 1..72: mol_type = genomic DNA

SEQ ID NO: 2710 - protein, 22 aa, Arabidopsis thaliana
PTKFLIVLFNKLRNEMIVVQYI

SEQ ID NO: 2711 - DNA, 63 bp, Arabidopsis thaliana
  source 1..63: mol_type = genomic DNA
taaactgagaaacgaaatgattgttgtacagtatatataaactgcaaatttcgtataaagtaa

SEQ ID NO: 2712 - protein, 19 aa, Arabidopsis thaliana
TEKRNDCCTVYINCKFRIK

SEQ ID NO: 2713 - DNA, 63 bp, Arabidopsis thaliana
  source 1..63: mol_type = genomic DNA
tgattgttgtacagtatatataaactgcaaatttcgtataaagtaaagtttctgagagattga

SEQ ID NO: 2714 - protein, 19 aa, Arabidopsis thaliana
LLYSIYKLQISYKVKFLRD

SEQ ID NO: 2715 - DNA, 54 bp, Arabidopsis thaliana
  source 1..54: mol_type = genomic DNA
taacaaatactacaaaaatcttttgagtttgaaaaaataatatttcatcattag

SEQ ID NO: 2716 - protein, 16 aa, Arabidopsis thaliana
QILQKSFEFEKIIFHH

SEQ ID NO: 2717 - DNA, 216 bp, Arabidopsis thaliana
  source 1..216: mol_type = genomic DNA
tgaaaaaataatatttcatcattagatttaccctggtttatagggaatatccgatctttcttcttatctatttggtttattttcttcttagttctttttgtagataagatcaatgaaactcattctctcttttcacctctattctcgggacataattatccacgagtcacaaaagagagtataatctttgtttaccacacgggtttaaaaacctaa

SEQ ID NO: 2718 - protein, 70 aa, Arabidopsis thaliana
KNNISSLDLPWFIGNIRSFFLSIWFIFFLVLFVDKINETHSLFSPLFSGHNYPRVTKESIIFVYHTGLKT

SEQ ID NO: 2719 - DNA, 69 bp, Arabidopsis thaliana
  source 1..69: mol_type = genomic DNA
taattatccacgagtcacaaaagagagtataatctttgtttaccacacgggtttaaaaacctaatctga

SEQ ID NO: 2720 - protein, 21 aa, Arabidopsis thaliana
LSTSHKREYNLCLPHGFKNLI

SEQ ID NO: 2721 - DNA, 168 bp, Arabidopsis thaliana
  source 1..168: mol_type = genomic DNA
tgatcttccaatgtcatgaagaagagagagtctgctagatttaaggacttatggaaaccggtacaagcattgacaacactggctatgaaggaatcaagaacggttcatggtttatccagttccgtaatggctgcaatccatggatggctagatatgtgtacggtctaa

SEQ ID NO: 2722 - protein, 54 aa, Arabidopsis thaliana
SSNVMKKRESARFKDLWKPVQALTTLAMKESRTVHGLSSSVMAAIHGWLDMCTV

SEQ ID NO: 2723 - DNA, 168 bp, Arabidopsis thaliana; identical to SEQ ID NO: 2721
  source 1..168: mol_type = genomic DNA

SEQ ID NO: 2724 - protein, 54 aa, Arabidopsis thaliana; identical to SEQ ID NO: 2722

SEQ ID NO: 2725 - DNA, 228 bp, Arabidopsis thaliana
  source 1..228: mol_type = genomic DNA
taagtttacctgagaaagatgaacgttctccgttcgatatcaatctcgccgttattctcgctggttttgctttcgaatcctacgcttcacctccggaaaatattggcaagcgtgaggttaatgcagctggatgtaacactctctacctctctgagtcatttgttagggagatatatgatggacaattgtttattaaactcaaaagaggatttgagtttcctgctttag

SEQ ID NO: 2726 - protein, 74 aa, Arabidopsis thaliana
VYLRKMNVLRSISISPLFSLVLLSNPTLHLRKILASVRLMQLDVTLSTSLSHLLGRYMMDNCLLNSKEDLSFLL

SEQ ID NO: 2727 - DNA, 60 bp, Arabidopsis thaliana
  source 1..60: mol_type = genomic DNA
tgaggaatcgaatcccaagaatcgaggtgtgagaagcagtatcagtcactagatgcatga

SEQ ID NO: 2728 - protein, 18 aa, Arabidopsis thaliana
GIESQESRCEKQYQSLDA

SEQ ID NO: 2729 - DNA, 63 bp, Arabidopsis thaliana
  source 1..63: mol_type = genomic DNA
tgagaagcagtatcagtcactagatgcatgacatttgaaagttggagtggaacttgttcttag

SEQ ID NO: 2730 - protein, 19 aa, Arabidopsis thaliana
EAVSVTRCMTFESWSGTCS

SEQ ID NO: 2731 - DNA, 63 bp, Arabidopsis thaliana; identical to SEQ ID NO: 2729
  source 1..63: mol_type = genomic DNA

SEQ ID NO: 2732 - protein, 19 aa, Arabidopsis thaliana
EAVSVTRCMTFESWSGTCS

SEQ ID NO: 2733 - DNA, 63 bp, Arabidopsis thaliana; identical to SEQ ID NO: 2729
  source 1..63: mol_type = genomic DNA

SEQ ID NO: 2734 - protein, 19 aa, Arabidopsis thaliana
EAVSVTRCMTFESWSGTCS

SEQ ID NO: 2735 - DNA, 75 bp, Arabidopsis thaliana
  source 1..75: mol_type = genomic DNA
tgagatatcgaattttcttctcaagctagttcttgtctgaatcgtggatcaatgcccatatctctggaagcttaa

SEQ ID NO: 2736 - protein, 23 aa, Arabidopsis thaliana
DIEFSSQASSCLNRGSMPISLEA

SEQ ID NO: 2737 - DNA, 153 bp, Arabidopsis thaliana
  source 1..153: mol_type = genomic DNA
tgactatttcctccattactgtttctaataacgctgtttccgacaatcgtcgtcatgtttcccgtgaaaatcgtcagcgttaagaaaaccgtcacttatatttttttttcttttcttcttcgtttttgtgaagatgatgatccactgatttga

SEQ ID NO: 2738 - protein, 49 aa, Arabidopsis thaliana
LFPPLLFLITLFPTIVVMFPVKIVSVKKTVTYIFFSFLLRFCEDDDPLI

SEQ ID NO: 2739 - DNA, 84 bp, Arabidopsis thaliana
  source 1..84: mol_type = genomic DNA
tgaaaatcgtcagcgttaagaaaaccgtcacttatatttttttttcttttcttcttcgtttttgtgaagatgatgatccactga

SEQ ID NO: 2740 - protein, 26 aa, Arabidopsis thaliana
KSSALRKPSLIFFFLFFFVFVKMMIH

SEQ ID NO: 2741 - DNA, 132 bp, Arabidopsis thaliana
  source 1..132: mol_type = genomic DNA
tgacttcttttgaaaaggagagaaggcatatatcgcgtggatttgaagacgaagaggaatcataaaaagcctaacgaagaagacgaagaagaagaggaacaaacaaccatgggtgaagtggttaagctatga

SEQ ID NO: 2742 - protein, 42 aa, Arabidopsis thaliana
LLLKRREGIYRVDLKTKRNHKKPNEEDEEEEEQTTMGEVVKL

SEQ ID NO: 2743 - DNA, 363 bp, Arabidopsis thaliana
  source 1..363: mol_type = genomic DNA
tgaaattacgattataccgttcaatgtttcttcttcaccgacttgaaagctatgacctttccgatcaccggcgttagttatgagcctcctctccgcggacgcacttgggttacttctcaagaatgcaatctccgcgagttccatgcgtttgggtcgcgtcgttcacgcaagaatcgtcaaaaccctcgattcaccaccacctccgtttctcgcgaactatctcatcaacatgtactcaaaactcgaccatccggaatcagcccgactcgttctccgactcactcctgcacgaaacgtcgtctcttggacttcacttatctccggacttgctcagaacggtcatttctccaccgctttggttga

SEQ ID NO: 2744 - protein, 119 aa, Arabidopsis thaliana
NYDYTVQCFFFTDLKAMTFPITGVSYEPPLRGRTWVTSQECNLREFHAFGSRRSRKNRQNPRFTTTSVSRELSHQHVLKTRPSGISPTRSPTHSCTKRRLLDFTYLRTCSERSFLHRFG

SEQ ID NO: 2745 - DNA, 99 bp, Arabidopsis thaliana
  source 1..99: mol_type = genomic DNA
tgacaccaaagagatcatatatctcatcattcgaagattttattccatacaaccgattttctccattttcttcaaaacgattcgggtcaaggttattga

SEQ ID NO: 2746 - protein, 31 aa, Arabidopsis thaliana
HQRDHISHHSKILFHTTDFLHFLQNDSGQGY

SEQ ID NO: 2747 - DNA, 99 bp, Arabidopsis thaliana; identical to SEQ ID NO: 2745
  source 1..99: mol_type = genomic DNA

SEQ ID NO: 2748 - protein, 31 aa, Arabidopsis thaliana; identical to SEQ ID NO: 2746

SEQ ID NO: 2749 - DNA, 75 bp, Arabidopsis thaliana
  source 1..75: mol_type = genomic DNA
tgaaacatctttgaggttgatgatgaggtttctgtttacttaatatcctgtgagagaaaactcttcttgacttga

SEQ ID NO: 2750 - protein, 23 aa, Arabidopsis thaliana
NIFEVDDEVSVYLISCERKLFLT

SEQ ID NO: 2751 - DNA, 123 bp, Arabidopsis thaliana
  source 1..123: mol_type = genomic DNA
taaaaattctctcttttattccttcttccatttctctctctcttcttccttctccagttactttggtctccgccatggctacacagagtttactttcctctttcgtcacttgactatgactga

SEQ ID NO: 2752 - protein, 39 aa, Arabidopsis thaliana
KFSLLFLLPFLSLFFLLQLLWSPPWLHRVYFPLSSLDYD

SEQ ID NO: 2753 - DNA, 57 bp, Arabidopsis thaliana
  source 1..57: mol_type = genomic DNA
taggtgatggatcaaaccgtttccctagaaccggtacaatccattgccaacggttaa

SEQ ID NO: 2754 - protein, 17 aa, Arabidopsis thaliana
VMDQTVSLEPVQSIANG

SEQ ID NO: 2755 - DNA, 123 bp, Arabidopsis thaliana
  source 1..123: mol_type = genomic DNA
tgatatcataacgattctcgctttccttctctcaacgttcccggggaattcccaaatcggcttgaaatttttggagaaattggagcttcgattcattcatttatgaggatctctgatgattag

SEQ ID NO: 2756 - protein, 39 aa, Arabidopsis thaliana
YHNDSRFPSLNVPGEFPNRLEIFGEIGASIHSFMRISDD

SEQ ID NO: 2757 - DNA, 54 bp, Arabidopsis thaliana
  source 1..54: mol_type = genomic DNA
tgaaatttttggagaaattggagcttcgattcattcatttatgaggatctctga

SEQ ID NO: 2758 - protein, 16 aa, Arabidopsis thaliana
NFWRNWSFDSFIYEDL

SEQ ID NO: 2759 - DNA, 54 bp, Arabidopsis thaliana
  source 1..54: mol_type = genomic DNA
tgaagacatcttcgtccttgctttcgaatcgctgaatcgtgttacgttttctag

SEQ ID NO: 2760 - protein, 16 aa, Arabidopsis thaliana
RHLRPCFRIAESCYVF

SEQ ID NO: 2761 - DNA, 78 bp, Arabidopsis thaliana
  source 1..78: mol_type = genomic DNA
tagtcctttgatttcttcgactggaatcgcaattccccactacgtcaagctggacagacaccgaagggatcgccatga

SEQ ID NO: 2762 - protein, 24 aa, Arabidopsis thaliana
SFDFFDWNRNSPLRQAGQTPKGSP

SEQ ID NO: 2763 - DNA, 135 bp, Arabidopsis thaliana
  source 1..135: mol_type = genomic DNA
tgatctctcaggaaggctttttataaatttgccctcaatttctccgtccctactactctttttgatcaatttctacgggaaaaagcaccaatctttaaacccgggcatgtccttgtaatcgagtatgttgtgtaa

SEQ ID NO: 2764 - protein, 43 aa, Arabidopsis thaliana
SLRKAFYKFALNFSVPTTLFDQFLREKAPIFKPGHVLVIEYVV

SEQ ID NO: 2765 - DNA, 102 bp, Arabidopsis thaliana
  source 1..102: mol_type = genomic DNA
taaagagagagcagaaaatgtgagtgggggaagatggagagtggtatgggaacaacaacaattgatgctatgacaaacaacaacagcaagaaatttgtgtga

SEQ ID NO: 2766 - protein, 32 aa, Arabidopsis thaliana
RESRKCEWGKMESGMGTTTIDAMTNNNSKKFV

SEQ ID NO: 2767 - DNA, 57 bp, Arabidopsis thaliana
  source 1..57: mol_type = genomic DNA
tgacaaacaacaacagcaagaaatttgtgtgagagtagagagtcttgcttcagttga

SEQ ID NO: 2768 - protein, 17 aa, Arabidopsis thaliana
QTTTARNLCESRESCFS

SEQ ID NO: 2769 - DNA, 135 bp, Arabidopsis thaliana; identical to SEQ ID NO: 2763
  source 1..135: mol_type = genomic DNA

SEQ ID NO: 2770 - protein, 43 aa, Arabidopsis thaliana; identical to SEQ ID NO: 2764

SEQ ID NO: 2771 - DNA, 102 bp, Arabidopsis thaliana; identical to SEQ ID NO: 2765
  source 1..102: mol_type = genomic DNA

SEQ ID NO: 2772 - protein, 32 aa, Arabidopsis thaliana; identical to SEQ ID NO: 2766

SEQ ID NO: 2773 - DNA, 135 bp, Arabidopsis thaliana; identical to SEQ ID NO: 2763
  source 1..135: mol_type = genomic DNA

SEQ ID NO: 2774 - protein, 43 aa, Arabidopsis thaliana; identical to SEQ ID NO: 2764

SEQ ID NO: 2775 - DNA, 54 bp, Arabidopsis thaliana
  source 1..54: mol_type = genomic DNA
tagcgttgtgctctggagaagtgtttgatcgcagaaaagcttcgttctttgtag

SEQ ID NO: 2776 - protein, 16 aa, Arabidopsis thaliana
RCALEKCLIAEKLRSL

SEQ ID NO: 2777 - DNA, 99 bp, Arabidopsis thaliana
  source 1..99: mol_type = genomic DNA
taattgttgttgttatcttcaacgatagcgttgtgctctggagaagtgtttgatcgcagaaaagcttcgttctttgtagtctacaggtttgatcactga

SEQ ID NO: 2778 - protein, 31 aa, Arabidopsis thaliana
LLLLSSTIALCSGEVFDRRKASFFVVYRFDH

SEQ ID NO: 2779 - DNA, 183 bp, Arabidopsis thaliana
  source 1..183: mol_type = genomic DNA
taagcgggcaaggagaatttcaacacatatcagtcagaacgatcagaggcagagcaaattcaatttcgaaacagtgactattacgagaagcgaaatggatacgtcgcttcttcttccgatcatcgatctttcttcgccggaaaaaatctccactactcaattgattcgtcaggcatgtcttga

SEQ ID NO: 2780 - protein, 59 aa, Arabidopsis thaliana
AGKENFNTYQSERSEAEQIQFRNSDYYEKRNGYVASSSDHRSFFAGKNLHYSIDSSGMS

SEQ ID NO: 2781 - DNA, 90 bp, Arabidopsis thaliana
  source 1..90: mol_type = genomic DNA
tgactattacgagaagcgaaatggatacgtcgcttcttcttccgatcatcgatctttcttcgccggaaaaaatctccactactcaattga

SEQ ID NO: 2782 - protein, 28 aa, Arabidopsis thaliana
LLREAKWIRRFFFRSSIFLRRKKSPLLN

SEQ ID NO: 2783 - DNA, 60 bp, Arabidopsis thaliana
  source 1..60: mol_type = genomic DNA
taagcatattgcagaagaggcggttctaattgttgcatggagttgaacaatatgacgtag

SEQ ID NO: 2784 - protein, 18 aa, Arabidopsis thaliana
AYCRRGGSNCCMELNNMT

SEQ ID NO: 2785 - DNA, 54 bp, Arabidopsis thaliana
  source 1..54: mol_type = genomic DNA
tgatatattgtaaacctgttcgactatataacatctttcaccttcgctctctag

SEQ ID NO: 2786 - protein, 16 aa, Arabidopsis thaliana
YIVNLFDYITSFTFAL

SEQ ID NO: 2787 - DNA, 141 bp, Arabidopsis thaliana
  source 1..141: mol_type = genomic DNA
tgaacaagaatgtgtaggcagaattgtcgcgcgaaatcctcaccggaggaagtgatttcaactgatgagaatctcttgatatattgtaaacctgttcgactatataacatctttcaccttcgctctctaggcaacgtatga

SEQ ID NO: 2788 - protein, 45 aa, Arabidopsis thaliana
TRMCRQNCRAKSSPEEVISTDENLLIYCKPVRLYNIFHLRSLGNV

SEQ ID NO: 2789 - DNA, 60 bp, Arabidopsis thaliana; identical to SEQ ID NO: 2783
  source 1..60: mol_type = genomic DNA

SEQ ID NO: 2790 - protein, 18 aa, Arabidopsis thaliana
AYCRRGGSNCCMELNNMT

SEQ ID NO: 2791 - DNA, 126 bp, Arabidopsis thaliana
  source 1..126: mol_type = genomic DNA
taatgttatttgaacttgttgtttgttgttgcagccatcgtttctgccaagatgcttgaactacaaaattggggcaaagcgcaaaagaaagtcaagatctactgggatggtagttttcaactataa

SEQ ID NO: 2792 - protein, 40 aa, Arabidopsis thaliana
CYLNLLFVVAAIVSAKMLELQNWGKAQKKVKIYWDGSFQL

SEQ ID NO: 2793 - DNA, 57 bp, Arabidopsis thaliana
  source 1..57: mol_type = genomic DNA
taatcgaggcgctcgaccgcagatcaatcaatacattcatggatcacggcatcgtga

SEQ ID NO: 2794 - protein, 17 aa, Arabidopsis thaliana
SRRSTADQSIHSWITAS

SEQ ID NO: 2795 - DNA, 60 bp, Arabidopsis thaliana
  source 1..60: mol_type = genomic DNA
tgagaaattggatcaaatggtgattcctattttctacaaagtagatccttctcatgttag

SEQ ID NO: 2796 - protein, 18 aa, Arabidopsis thaliana
EIGSNGDSYFLQSRSFSC

SEQ ID NO: 2797 - DNA, 108 bp, Arabidopsis thaliana
  source 1..108: mol_type = genomic DNA
tagatccttctcatgttagaaaacagaccggagagtttggcatggtctttggggagacctgcaagggcagaacagagaatgagaagcgaaaatggatgcgagctctag

SEQ ID NO: 2798 - protein, 34 aa, Arabidopsis thaliana
ILLMLENRPESLAWSLGRPARAEQRMRSENGCEL

SEQ ID NO: 2799 - DNA, 132 bp, Arabidopsis thaliana
  source 1..132: mol_type = genomic DNA
taaactttaaattcaattctgtattgttctcaaactcgaacccgaaactttaaatccttccttatttgttttctggagttcttgtttagaactgttttggatttgttttttttgaggagatgctttagttaa

SEQ ID NO: 2800 - protein, 42 aa, Arabidopsis thaliana
TLNSILYCSQTRTRNFKSFLICFLEFLFRTVLDLFFLRRCFS

SEQ ID NO: 2801 - DNA, 132 bp, Arabidopsis thaliana; identical to SEQ ID NO: 2799
  source 1..132: mol_type = genomic DNA

SEQ ID NO: 2802 - protein, 42 aa, Arabidopsis thaliana; identical to SEQ ID NO: 2800

SEQ ID NO: 2803 - DNA, 108 bp, Arabidopsis thaliana
  source 1..108: mol_type = genomic DNA
taaattcaattctgtattgttctcaaactcgaacccgaaactttaaatccttccttatttgttttctggagttcttgtttagaactgttttggatttgttttttttga

SEQ ID NO: 2804 - protein, 34 aa, Arabidopsis thaliana
IQFCIVLKLEPETLNPSLFVFWSSCLELFWICFF

SEQ ID NO: 2805 - DNA, 81 bp, Arabidopsis thaliana
  source 1..81: mol_type = genomic DNA
tgactatttcacatttccaaccgcctcttgcgtgctcttgaggaaacgatcctcatgcctctccttcgattccgtttctag

SEQ ID NO: 2806 - protein, 25 aa, Arabidopsis thaliana
LFHISNRLLRALEETILMPLLRFRF

SEQ ID NO: 2807 - DNA, 81 bp, Arabidopsis thaliana; identical to SEQ ID NO: 2805
  source 1..81: mol_type = genomic DNA

SEQ ID NO: 2808 - protein, 25 aa, Arabidopsis thaliana
LFHISNRLLRALEETILMPLLRFRF

SEQ ID NO: 2809 - DNA, 81 bp, Arabidopsis thaliana; identical to SEQ ID NO: 2805
  source 1..81: mol_type = genomic DNA

SEQ ID NO: 2810 - protein, 25 aa, Arabidopsis thaliana
LFHISNRLLRALEETILMPLLRFRF

SEQ ID NO: 2811 - DNA, 123 bp, Arabidopsis thaliana
  source 1..123: mol_type = genomic DNA
tgaattgaagccagtgattcaattgtttggagatatctgagcattgtccctgcgatgtattcgattcaatccaacacgggcgttctcgtttcgtttctgagctttgtgggaaattctcgttga

SEQ ID NO: 2812 - protein, 39 aa, Arabidopsis thaliana
IEASDSIVWRYLSIVPAMYSIQSNTGVLVSFLSFVGNSR

SEQ ID NO: 2813 - DNA, 114 bp, Arabidopsis thaliana
  source 1..114: mol_type = genomic DNA
tgattcaattgtttggagatatctgagcattgtccctgcgatgtattcgattcaatccaacacgggcgttctcgtttcgtttctgagctttgtgggaaattctcgttgatttga

SEQ ID NO: 2814 - protein, 36 aa, Arabidopsis thaliana
FNCLEISEHCPCDVFDSIQHGRSRFVSELCGKFSLI

SEQ ID NO: 2815 - DNA, 123 bp, Arabidopsis thaliana; identical to SEQ ID NO: 2811
  source 1..123: mol_type = genomic DNA

SEQ ID NO: 2816 - protein, 39 aa, Arabidopsis thaliana; identical to SEQ ID NO: 2812

SEQ ID NO: 2817 - DNA, 123 bp, Arabidopsis thaliana; identical to SEQ ID NO: 2811
  source 1..123: mol_type = genomic DNA

SEQ ID NO: 2818 - protein, 39 aa, Arabidopsis thaliana; identical to SEQ ID NO: 2812

SEQ ID NO: 2819 - DNA, 114 bp, Arabidopsis thaliana; identical to SEQ ID NO: 2813
  source 1..114: mol_type = genomic DNA

SEQ ID NO: 2820 - protein, 36 aa, Arabidopsis thaliana; identical to SEQ ID NO: 2814

SEQ ID NO: 2821 - DNA, 285 bp, Arabidopsis thaliana
  source 1..285: mol_type = genomic DNA
tgacggcggcgaaaagcggcggtgttggccgcaaaaacgatgcaaaaccagctatggtcattaccgctaacgatttatcaaaatgggaaaattttcctaaaggacttaaggttcttcttctcctcaacggctgtgacagcgacggagatggctcctcagccgccgagactcgatcagagctcgaatcaatggactatatcgttactacattcaccgatgaaactgaagcactctctgcggttgtcaagaacccggagagcttccacattgccatcgtcgaggtga

SEQ ID NO: 2822 - protein, 93 aa, Arabidopsis thaliana
RRRKAAVLAAKTMQNQLWSLPLTIYQNGKIFLKDLRFFFSSTAVTATEMAPQPPRLDQSSNQWTISLLHSPMKLKHSLRLSRTRRASTLPSSR

SEQ ID NO: 2823 - DNA, 126 bp, Arabidopsis thaliana
  source 1..126: mol_type = genomic DNA
taacccaatgacaagaacaacactagtcaccaacttattataactcttcatccattttctctctctcaaagtcaccccccaaatttttttatttttttttttaactttgaatgtgactcaggatag

SEQ ID NO: 2824 - protein, 40 aa, Arabidopsis thaliana
PNDKNNTSHQLIITLHPFSLSQSHPPNFFIFFFNFECDSG

SEQ ID NO: 2825 - DNA, 117 bp, Arabidopsis thaliana
  source 1..117: mol_type = genomic DNA
taactcttcatccattttctctctctcaaagtcaccccccaaatttttttatttttttttttaactttgaatgtgactcaggatagagagagggcgagacagataaagagagcttga

SEQ ID NO: 2826 - protein, 37 aa, Arabidopsis thaliana
LFIHFLSLKVTPQIFLFFFLTLNVTQDRERARQIKRA

SEQ ID NO: 2827 - DNA, 66 bp, Arabidopsis thaliana
  source 1..66: mol_type = genomic DNA
tgagtttttagtctttcactttgttcaagttcgaagctttttttggagggaattttgggcttctga

SEQ ID NO: 2828 - protein, 20 aa, Arabidopsis thaliana
VFSLSLCSSSKLFLEGILGF

SEQ ID NO: 2829 - DNA, 264 bp, Arabidopsis thaliana
  source 1..264: mol_type = genomic DNA
tagagaagctctggattccgtctcttcccgtcgtcggcgacggtggttttgcccgttggctctgaggttatatcaggctttaatttaagtggattgtcatcttctgagatatggaacaagtttttgtctggccaagctgctaccactatcggcttttctcattccaagaagcgctcgattggcggtttcttgtacgttctgatttccttgtgggctctttcgttaactgcacttagtggtcaaaccctcttctatgatctttag

SEQ ID NO: 2830 - protein, 86 aa, Arabidopsis thaliana
RSSGFRLFPSSATVVLPVGSEVISGFNLSGLSSSEIWNKFLSGQAATTIGFSHSKKRSIGGFLYVLISLWALSLTALSGQTLFYDL

SEQ ID NO: 2831 - DNA, 132 bp, Arabidopsis thaliana
  source 1..132: mol_type = genomic DNA
tgagatatggaacaagtttttgtctggccaagctgctaccactatcggcttttctcattccaagaagcgctcgattggcggtttcttgtacgttctgatttccttgtgggctctttcgttaactgcacttag

SEQ ID NO: 2832 - protein, 42 aa, Arabidopsis thaliana
DMEQVFVWPSCYHYRLFSFQEALDWRFLVRSDFLVGSFVNCT

SEQ ID NO: 2833 - DNA, 57 bp, Arabidopsis thaliana
  source 1..57: mol_type = genomic DNA
tgaagaaagatacatcaatttcttttctttttcagtttacaaatgtcgtttccttga

SEQ ID NO: 2834 - protein, 17 aa, Arabidopsis thaliana
RKIHQFLFFFSLQMSFP

SEQ ID NO: 2835 - DNA, 264 bp, Arabidopsis thaliana; identical to SEQ ID NO: 2829
  source 1..264: mol_type = genomic DNA

SEQ ID NO: 2836 - protein, 86 aa, Arabidopsis thaliana; identical to SEQ ID NO: 2830

SEQ ID NO: 2837 - DNA, 132 bp, Arabidopsis thaliana; identical to SEQ ID NO: 2831
  source 1..132: mol_type = genomic DNA

SEQ ID NO: 2838 - protein, 42 aa, Arabidopsis thaliana; identical to SEQ ID NO: 2832

SEQ ID NO: 2839 - DNA, 264 bp, Arabidopsis thaliana; identical to SEQ ID NO: 2829
  source 1..264: mol_type = genomic DNA

SEQ ID NO: 2840 - protein, 86 aa, Arabidopsis thaliana; identical to SEQ ID NO: 2830

SEQ ID NO: 2841 - DNA, 240 bp, Arabidopsis thaliana
  source 1..240: mol_type = genomic DNA
taagaagattcgttgttgaatcagagagaaagaaagcatccatttttctatcattgcttgcttgctatggaattgggtaaatctcgattctacttatgttgcaattgcttttctcctgttagattttccgattattctttagctggaagtgattatccagacgccatctccatcactttcaattgtattcctataccttcttctgaagattcttcgtatttctcgattcgatgtttataa

SEQ ID NO: 2842 - protein, 78 aa, Arabidopsis thaliana
EDSLLNQRERKHPFFYHCLLAMELGKSRFYLCCNCFSPVRFSDYSLAGSDYPDAISITFNCIPIPSSEDSSYFSIRCL

SEQ ID NO: 2843 - DNA, 57 bp, Arabidopsis thaliana
  source 1..57: mol_type = genomic DNA
tgattatccagacgccatctccatcactttcaattgtattcctataccttcttctga

SEQ ID NO: 2844 - protein, 17 aa, Arabidopsis thaliana
LSRRHLHHFQLYSYTFF

SEQ ID NO: 2845 - DNA, 240 bp, Arabidopsis thaliana; identical to SEQ ID NO: 2841
  source 1..240: mol_type = genomic DNA

SEQ ID NO: 2846 - protein, 78 aa, Arabidopsis thaliana; identical to SEQ ID NO: 2842

SEQ ID NO: 2847 - DNA, 57 bp, Arabidopsis thaliana; identical to SEQ ID NO: 2843
  source 1..57: mol_type = genomic DNA

SEQ ID NO: 2848 - protein, 17 aa, Arabidopsis thaliana
LSRRHLHHFQLYSYTFF

SEQ ID NO: 2849 - DNA, 141 bp, Arabidopsis thaliana
  source 1..141: mol_type = genomic DNA
tgaacaatggtggagaaatcagtaaagttattggctagaaacctaaaagtatatggcaacaaaggagtttttccttctcgacagtctaaaggtgatcttgcagaggacttatctgatatcagtgatgctgagtctctataa

SEQ ID NO: 2850 - protein, 45 aa, Arabidopsis thaliana
TMVEKSVKLLARNLKVYGNKGVFPSRQSKGDLAEDLSDISDAESL

SEQ ID NO: 2851 - DNA, 51 bp, Arabidopsis thaliana
  source 1..51: mol_type = genomic DNA
taacgaagatttttgtggtttcttctgattaatgatgatgataaagcttga

SEQ ID NO: 2852 - protein, 15 aa, Arabidopsis thaliana
RRFLWFLLINDDDKA

SEQ ID NO: 2853 - DNA, 54 bp, Arabidopsis thaliana
  source 1..54: mol_type = genomic DNA
tgaatattgtacaccaactgttcgatgaaatgtcttacagagatttcgtcctga

SEQ ID NO: 2854 - protein, 16 aa, Arabidopsis thaliana
ILYTNCSMKCLTEISS

SEQ ID NO: 2855 - DNA, 54 bp, Arabidopsis thaliana; identical to SEQ ID NO: 2853
  source 1..54: mol_type = genomic DNA

SEQ ID NO: 2856 - protein, 16 aa, Arabidopsis thaliana
ILYTNCSMKCLTEISS

SEQ ID NO: 2857 - DNA, 120 bp, Arabidopsis thaliana
  source 1..120: mol_type = genomic DNA
tgagtgggtttttctcctctgttttatttctctaatagccctagattcaaggagataaaactgctcaaatcaggtggagatttgctctgcttcattggttttttgttttgtttgagttag

SEQ ID NO: 2858 - protein, 38 aa, Arabidopsis thaliana
VGFSPLFYFSNSPRFKEIKLLKSGGDLLCFIGFLFCLS

SEQ ID NO: 2859 - DNA, 60 bp, Arabidopsis thaliana
  source 1..60: mol_type = genomic DNA
taaaactgctcaaatcaggtggagatttgctctgcttcattggttttttgttttgtttga

SEQ ID NO: 2860 - protein, 18 aa, Arabidopsis thaliana
NCSNQVEICSASLVFCFV

SEQ ID NO: 2861 - DNA, 141 bp, Arabidopsis thaliana
  source 1..141: mol_type = genomic DNA
tagactctattgatcttcagatcgtgtcgagatttagctgctattgtggggtttagaatccttctctttaccggattctcaggttataaatctcctttacttctttcaatgaagttgttcgatgaattggctacattttag

SEQ ID NO: 2862 - protein, 45 aa, Arabidopsis thaliana
TLLIFRSCRDLAAIVGFRILLFTGFSGYKSPLLLSMKLFDELATF

SEQ ID NO: 2863 - DNA, 57 bp, Arabidopsis thaliana
  source 1..57: mol_type = genomic DNA
taggaaaaagtaagaatcctagtttctcgacttcgattgagaaggttttcgatttga

SEQ ID NO: 2864 - protein, 17 aa, Arabidopsis thaliana
EKVRILVSRLRLRRFSI

SEQ ID NO: 2865 - DNA, 135 bp, Arabidopsis thaliana
  source 1..135: mol_type = genomic DNA
tgataccgcagcaatggacgccgccgtgtgggagcaaatgcacgaataagtactcagcatttacgcagcttccatggagagtattctgcaaaaagggatgtgatgccgatagtgactcatgggaagattgtttaa

SEQ ID NO: 2866 - protein, 43 aa, Arabidopsis thaliana
YRSNGRRRVGANARISTQHLRSFHGEYSAKRDVMPIVTHGKIV

SEQ ID NO: 2867 - DNA, 51 bp, Arabidopsis thaliana
  source 1..51: mol_type = genomic DNA
taaaattgggatatacaggcagaagaaaatcgagataaatcaactaaatga

SEQ ID NO: 2868 - protein, 15 aa, Arabidopsis thaliana
NWDIQAEENRDKSTK

SEQ ID NO: 2869 - DNA, 60 bp, Arabidopsis thaliana
  source 1..60: mol_type = genomic DNA
tagctagggtttcattgtgtgcacaaaatgggatatacaggcagaagaaaatcgagataa

SEQ ID NO: 2870 - protein, 18 aa, Arabidopsis thaliana
LGFHCVHKMGYTGRRKSR

SEQ ID NO: 2871 - DNA, 69 bp, Arabidopsis thaliana
  source 1..69: mol_type = genomic DNA
tagggtttcattgtgtgcacaaaatgggatatacaggcagaagaaaatcgagataaatcaactaaatga

SEQ ID NO: 2872 - protein, 21 aa, Arabidopsis thaliana
GFIVCTKWDIQAEENRDKSTK

SEQ ID NO: 2873 - DNA, 285 bp, Arabidopsis thaliana
  source 1..285: mol_type = genomic DNA
taatcatgccaacatcagcaacagcggtggctccatcaactggatctgtccagaaaaaagatcaagactggcgtgcgattttgtctcccgagcaatttagagttctcagggaaaagggcacagagaaccgaggtaaaggagagtataccaaactgttcgacgacggaatctatagttgtgctggttgtgcaactcctctttataagtccaccactaagttcgactctggttgtggctggccttccttcttcgatgctatccctggtgccattaaacaaacggtaa

SEQ ID NO: 2874 - protein, 93 aa, Arabidopsis thaliana
SCQHQQQRWLHQLDLSRKKIKTGVRFCLPSNLEFSGKRAQRTEVKESIPNCSTTESIVVLVVQLLFISPPLSSTLVVAGLPSSMLSLVPLNKR

SEQ ID NO: 2875 - DNA, 60 bp, Arabidopsis thaliana
  source 1..60: mol_type = genomic DNA
tgaacagtaaaactcccaaatttgcaaatgactcatcttcttcacctggagagaatctag

SEQ ID NO: 2876 - protein, 18 aa, Arabidopsis thaliana
TVKLPNLQMTHLLHLERI

SEQ ID NO: 2877 - DNA, 60 bp, Arabidopsis thaliana; identical to SEQ ID NO: 2875
  source 1..60: mol_type = genomic DNA

SEQ ID NO: 2878 - protein, 18 aa, Arabidopsis thaliana
TVKLPNLQMTHLLHLERI

SEQ ID NO: 2879 - DNA, 75 bp, Arabidopsis thaliana
  source 1..75: mol_type = genomic DNA
taattaaaaaaaaaaaaaaaaaaaaaaaaaaaaaaaaaaaatttaataattaatgctagttttgtttctggctaa

SEQ ID NO: 2880 - protein, 23 aa, Arabidopsis thaliana
LKKKKKKKKKKKNLIINASFVSG

SEQ ID NO: 2881 - DNA, 75 bp, Arabidopsis thaliana
  source 1..75: mol_type = genomic DNA
tgatcacgcctgaaaggtttattaggatttggcaaaaggatggatagaatcaacggtctatcagatctcttctga

SEQ ID NO: 2882 - protein, 23 aa, Arabidopsis thaliana
SRLKGLLGFGKRMDRINGLSDLF

SEQ ID NO: 2883 - DNA, 216 bp, Arabidopsis thaliana
  source 1..216: mol_type = genomic DNA
tgaaatggcaaagtttcaggcgattttaacatgcgaaggaatacacagacgaagcctatcgatagtgagcacttttcatcttctttatctttctttcttcttcttcacggaactcaagcacgatggctcgaactttcatcttgtggcttcacgggttgggagattctggacctgctaatgaacccatccaaactcaattcaaatcctcggagttaa

SEQ ID NO: 2884 - protein, 70 aa, Arabidopsis thaliana
NGKVSGDFNMRRNTQTKPIDSEHFSSSLSFFLLLHGTQARWLELSSCGFTGWEILDLLMNPSKLNSNPRS

SEQ ID NO: 2885 - DNA, 135 bp, Arabidopsis thaliana
  source 1..135: mol_type = genomic DNA
tagctatacaccaaaactaggtatagagagagaaaccctacaaaatcaaaaggaagaagagacgaagatgaagaagatccagcttggatttcgttgttcatcattactactctctttcttcttctagctagctag

SEQ ID NO: 2886 - protein, 43 aa, Arabidopsis thaliana
LYTKTRYRERNPTKSKGRRDEDEEDPAWISLFIITTLFLLLAS

SEQ ID NO: 2887 - DNA, 63 bp, Arabidopsis thaliana
  source 1..63: mol_type = genomic DNA
tgaagaagatccagcttggatttcgttgttcatcattactactctctttcttcttctagctag

SEQ ID NO: 2888 - protein, 19 aa, Arabidopsis thaliana
RRSSLDFVVHHYYSLSSSS

SEQ ID NO: 2889 - DNA, 189 bp, Arabidopsis thaliana
  source 1..189: mol_type = genomic DNA
taaataataatatatattccattttgtcgcataaacaaaaaaatctctgaaacagcgaaatttgtgccgtttttttcctttcctgccttgtgcttctgtttctgcttctgcttcctcttcatcagacccaatgaatcagagattcttctgagaaaattagggttttgtctcctcaatttcatttggtaa

SEQ ID NO: 2890 - protein, 61 aa, Arabidopsis thaliana
IIIYIPFCRINKKISETAKFVPFFSFPALCFCFCFCFLFIRPNESEILLRKLGFCLLNFIW

SEQ ID NO: 2891 - DNA, 180 bp, Arabidopsis thaliana
  source 1..180: mol_type = genomic DNA
tagcgggaactctcaaaatttcgaaatcaatggcgtcctctggcgacgacctccgtcttctctctctcatcgacgtcggcgataatgtcttctcttccttctccgattaccttaaacctttctctactctatccacttcccggaaaaaacaagaccgagcaaccacgattcgagccctag

SEQ ID NO: 2892 - protein, 58 aa, Arabidopsis thaliana
RELSKFRNQWRPLATTSVFSLSSTSAIMSSLPSPITLNLSLLYPLPGKNKTEQPRFEP

SEQ ID NO: 2893 - DNA, 150 bp, Arabidopsis thaliana
  source 1..150: mol_type = genomic DNA
tgattcttcttctttccttttttggtttcttctccaattttgtttcctttctcaccgtatcccaattcaactctcattaaaataatatttctaatgtatctgctgagcttagagaaagcggccccaaaaatttacaattttgcgacatag

SEQ ID NO: 2894 - protein, 48 aa, Arabidopsis thaliana
FFFFPFLVSSPILFPFSPYPNSTLIKIIFLMYLLSLEKAAPKIYNFAT

SEQ ID NO: 2895 - DNA, 150 bp, Arabidopsis thaliana; identical to SEQ ID NO: 2893
  source 1..150: mol_type = genomic DNA

SEQ ID NO: 2896 - protein, 48 aa, Arabidopsis thaliana; identical to SEQ ID NO: 2894

SEQ ID NO: 2897 - DNA, 72 bp, Arabidopsis thaliana
  source 1..72: mol_type = genomic DNA
tagagaaagcggccccaaaaatttacaattttgcgacatagaaatatctgggctacctctctttctctctga

SEQ ID NO: 2898 - protein, 22 aa, Arabidopsis thaliana
RKRPQKFTILRHRNIWATSLSL

SEQ ID NO: 2899 - DNA, 168 bp, Arabidopsis thaliana
  source 1..168: mol_type = genomic DNA
tgaaactgggatgttgaagttattctgctaaccattcttagtgctgtcaagctttggactgtcttcaagagttctaaggactacaggaacctcgagctatgggctctgataaaaattctgctcgttttctacataacctcaagatggagagggtcagaacgattttaa

SEQ ID NO: 2900 - protein, 54 aa, Arabidopsis thaliana
NWDVEVILLTILSAVKLWTVFKSSKDYRNLELWALIKILLVFYITSRWRGSERF

SEQ ID NO: 2901 - DNA, 99 bp, Arabidopsis thaliana
  source 1..99: mol_type = genomic DNA
tgattctccgatgacgtccatcagttcctccgatcacccccttccggtgagcaagaaacgattaaagccattgatattacgagatttccttctcgatga

SEQ ID NO: 2902 - protein, 31 aa, Arabidopsis thaliana
FSDDVHQFLRSPPSGEQETIKAIDITRFPSR

SEQ ID NO: 2903 - DNA, 90 bp, Arabidopsis thaliana
  source 1..90: mol_type = genomic DNA
tagcttaaggtcttcccttgtggaagagcctgcgtcattatttgtggcagagggggtttgcgttcgcgcagcccctaccattcccagtag

SEQ ID NO: 2904 - protein, 28 aa, Arabidopsis thaliana
LKVFPCGRACVIICGRGGLRSRSPYHSQ

SEQ ID NO: 2905 - DNA, 147 bp, Arabidopsis thaliana
  source 1..147: mol_type = genomic DNA
taacaaatctcagagtttgtgttaatttcttctttccttacatcttttccagaagaaaaaaagctgaaagatgtggttttttggatcgaaaggagcatctggattctcttctcgttccacagcagaggaagtcacacatggtgttga

SEQ ID NO: 2906 - protein, 47 aa, Arabidopsis thaliana
QISEFVLISSFLTSFPEEKKLKDVVFWIERSIWILFSFHSRGSHTWC

SEQ ID NO: 2907 - DNA, 90 bp, Arabidopsis thaliana; identical to SEQ ID NO: 2903
  source 1..90: mol_type = genomic DNA

SEQ ID NO: 2908 - protein, 28 aa, Arabidopsis thaliana
LKVFPCGRACVIICGRGGLRSRSPYHSQ

SEQ ID NO: 2909 - DNA, 90 bp, Arabidopsis thaliana; identical to SEQ ID NO: 2903
  source 1..90: mol_type = genomic DNA

SEQ ID NO: 2910 - protein, 28 aa, Arabidopsis thaliana
LKVFPCGRACVIICGRGGLRSRSPYHSQ

SEQ ID NO: 2911 - DNA, 225 bp, Arabidopsis thaliana
  source 1..225: mol_type = genomic DNA
taaataaagaacatggtcgaagcttgcaaattacttacctggacggggtcaactcgtgatcaagaagacgagtggcctaggctagtgaattccattgcacataacggaagggtgcttagcttaaggtcttcccttgtggaagagcctgcgtcattatttgtggcagagggggtttgcgttcgcgcagcccctaccattcccagtagttcaatcttttgttcatga

SEQ ID NO: 2912 - protein, 73 aa, Arabidopsis thaliana
IKNMVEACKLLTWTGSTRDQEDEWPRLVNSIAHNGRVLSLRSSLVEEPASLFVAEGVCVRAAPTIPSSSIFCS

SEQ ID NO: 2913 - DNA, 231 bp, Arabidopsis thaliana
  source 1..231: mol_type = genomic DNA
tgattgtggatcagattctcaaagacttttcgcgaagagtctctgatccttaaatcgcttctctctcgcttgacctcatttcgtcgtcgaaatcagatccttgtgaaaatgccgaaacaggatatggagaagatggagcttcgtaagaacttccgtaatgtttggcataccgatcttacccacagtatccagaacgatactccttattgttgcttcgcgttgtggtggtaa

SEQ ID NO: 2914 - protein, 75 aa, Arabidopsis thaliana
LWIRFSKTFREESLILKSLLSRLTSFRRRNQILVKMPKQDMEKMELRKNFRNVWHTDLTHSIQNDTPYCCFALWW

SEQ ID NO: 2915 - DNA, 144 bp, Arabidopsis thaliana
  source 1..144: mol_type = genomic DNA
tgaaaatgccgaaacaggatatggagaagatggagcttcgtaagaacttccgtaatgtttggcataccgatcttacccacagtatccagaacgatactccttattgttgcttcgcgttgtggtggtaagtttcgattgatctga

SEQ ID NO: 2916 - protein, 46 aa, Arabidopsis thaliana
KCRNRIWRRWSFVRTSVMFGIPILPTVSRTILLIVASRCGGKFRLI

SEQ ID NO: 2917 - DNA, 87 bp, Arabidopsis thaliana
  source 1..87: mol_type = genomic DNA
taatgtttggcataccgatcttacccacagtatccagaacgatactccttattgttgcttcgcgttgtggtggtaagtttcgattga

SEQ ID NO: 2918 - protein, 27 aa, Arabidopsis thaliana
CLAYRSYPQYPERYSLLLLRVVVVSFD

SEQ ID NO: 2919 - DNA, 72 bp, Arabidopsis thaliana
  source 1..72: mol_type = genomic DNA
tgaaaatcacaagctcttcttaacttcacaagtgcttcaatggcggttcttcacattatcttcactgcgtaa

SEQ ID NO: 2920 - protein, 22 aa, Arabidopsis thaliana
KSQALLNFTSASMAVLHIIFTA

SEQ ID NO: 2921 - DNA, 51 bp, Arabidopsis thaliana
  source 1..51: mol_type = genomic DNA
tgaatccgtttgagaaagaccgaatcttgtggactgtctctaacattttag

SEQ ID NO: 2922 - protein, 15 aa, Arabidopsis thaliana
IRLRKTESCGLSLTF

SEQ ID NO: 2923 - DNA, 105 bp, Arabidopsis thaliana
  source 1..105: mol_type = genomic DNA
taacatccgctagatccttctttcttccaaacccttaagctccaccttcgttttccccaatttctctctctctctgccttcgtttatctatgtcttgaaaagtga

SEQ ID NO: 2924 - protein, 33 aa, Arabidopsis thaliana
HPLDPSFFQTLKLHLRFPQFLSLSAFVYLCLEK

SEQ ID NO: 2925 - DNA, 63 bp, Arabidopsis thaliana
  source 1..63: mol_type = genomic DNA
taagctccaccttcgttttccccaatttctctctctctctgccttcgtttatctatgtcttga

SEQ ID NO: 2926 - protein, 19 aa, Arabidopsis thaliana
APPSFSPISLSLCLRLSMS

SEQ ID NO: 2927 - DNA, 138 bp, Arabidopsis thaliana
  source 1..138: mol_type = genomic DNA
taagtattagatagcttcctcttcttcttctccagtatctggcgacgaattcaactagagattattttctctttttcttgtctcctcttgatcgtttgtttttgtttgtatctggattcaatgacgggatttggttaa

SEQ ID NO: 2928 - protein, 44 aa, Arabidopsis thaliana
VLDSFLFFFSSIWRRIQLEIIFSFSCLLLIVCFCLYLDSMTGFG

SEQ ID NO: 2929 - DNA, 96 bp, Arabidopsis thaliana
  source 1..96: mol_type = genomic DNA
tgaaactcttcacgccaaagccaaaatacaataactttttcccaatgggaaatatcttttatcgtggagagaaacaaacaaagagcttcgacctaa

SEQ ID NO: 2930 - protein, 30 aa, Arabidopsis thaliana
NSSRQSQNTITFSQWEISFIVERNKQRAST

SEQ ID NO: 2931 - DNA, 159 bp, Arabidopsis thaliana
  source 1..159: mol_type = genomic DNA
tgattcgcctcgaaatttacacagacttgtcgctctctctttctctcttatttcacagagcccctaaacatttccaaaaatcttgcaaaggaagaaaaacaatggacaaattttggactttcctcactgctcttcattcaggcgctgggcctatcgtga

SEQ ID NO: 2932 - protein, 51 aa, Arabidopsis thaliana
FASKFTQTCRSLFLSYFTEPLNISKNLAKEEKQWTNFGLSSLLFIQALGLS

SEQ ID NO: 2933 - DNA, 72 bp, Arabidopsis thaliana
  source 1..72: mol_type = genomic DNA
tagttcatgttcgagtttctctggtctcttactctttcacctagaaatttgtttggtctcccaacaacataa

SEQ ID NO: 2934 - protein, 22 aa, Arabidopsis thaliana
FMFEFLWSLTLSPRNLFGLPTT

SEQ ID NO: 2935 - DNA, 81 bp, Arabidopsis thaliana
  source 1..81: mol_type = genomic DNA
taatatgtatgttttaggtcgaattttctgaaattaagattcattcctccatggaagaagctctgtttttattctctttag

SEQ ID NO: 2936 - protein, 25 aa, Arabidopsis thaliana
YVCFRSNFLKLRFIPPWKKLCFYSL

SEQ ID NO: 2937 - DNA, 72 bp, Arabidopsis thaliana
  source 1..72: mol_type = genomic DNA
taggtcgaattttctgaaattaagattcattcctccatggaagaagctctgtttttattctctttagcttag

SEQ ID NO: 2938 - protein, 22 aa, Arabidopsis thaliana
VEFSEIKIHSSMEEALFLFSLA

SEQ ID NO: 2939 - DNA, 57 bp, Arabidopsis thaliana
  source 1..57: mol_type = genomic DNA
taagattcattcctccatggaagaagctctgtttttattctctttagcttagcttag

SEQ ID NO: 2940 - protein, 17 aa, Arabidopsis thaliana
DSFLHGRSSVFILFSLA

SEQ ID NO: 2941 - DNA, 177 bp, Arabidopsis thaliana
  source 1..177: mol_type = genomic DNA
tgaaacaaacacaaaaagcaacaatttgtctttgaaaatctcctctgtgtatggttcagcttcggtttactaaatctctatgccgtcacgatcaatctcggcaccggttccggttcttgctccggctccgatcgtttcctctttagtcccagcagcgccgtcaggacatcagaataa

SEQ ID NO: 2942 - protein, 57 aa, Arabidopsis thaliana
NKHKKQQFVFENLLCVWFSFGLLNLYAVTINLGTGSGSCSGSDRFLFSPSSAVRTSE

SEQ ID NO: 2943 - DNA, 195 bp, Arabidopsis thaliana
  source 1..195: mol_type = genomic DNA
tgaaggcagctgcttctatgccatattgccgagaaaatgggcgagtctaaggggtgcgggaatgttggacgaatgatttcgaagaataagtctgcgaattcttataacctctctcttcagttgtctcctgttgtttctttctgggattgtattgtccgcaccatgaggtattcctatataccagagtgggtgtag

SEQ ID NO: 2944 - protein, 63 aa, Arabidopsis thaliana
RQLLLCHIAEKMGESKGCGNVGRMISKNKSANSYNLSLQLSPVVSFWDCIVRTMRYSYIPEWV

SEQ ID NO: 2945 - DNA, 183 bp, Arabidopsis thaliana
  source 1..183: mol_type = genomic DNA
tagaacaattgtgtctgcttgaaaatgggcgagtctaaggggtgcgggaatgttggacgaatgatttcgaagaataagtctgcgaattcttataacctctctcttcagttgtctcctgttgtttctttctgggattgtattgtccgcaccatgaggtattcctatataccagagtgggtgtag

SEQ ID NO: 2946 - protein, 59 aa, Arabidopsis thaliana
NNCVCLKMGESKGCGNVGRMISKNKSANSYNLSLQLSPVVSFWDCIVRTMRYSYIPEWV

SEQ ID NO: 2947 - DNA, 225 bp, Arabidopsis thaliana
  source 1..225: mol_type = genomic DNA
tagagtagttctttgagtcagctgcttctatgccattttctagaggtttggatccaatttcatcatcttgttgatccgtttatcttcaatttccatagattttttctaattgaattgacttctttcgagaaaagtttttcgagcagtttcatttgttcatcagatttaatgcttaattatgggtttctgaggcagatctggtcactctcgattgattgcttctag

SEQ ID NO: 2948 - protein, 73 aa, Arabidopsis thaliana
SSSLSQLLLCHFLEVWIQFHHLVDPFIFNFHRFFLIELTSFEKSFSSSFICSSDLMLNYGFLRQIWSLSIDCF

SEQ ID NO: 2949 - DNA, 57 bp, Arabidopsis thaliana
  source 1..57: mol_type = genomic DNA
tgaggcagatctggtcactctcgattgattgcttctagtttgcatccattgaaatga

SEQ ID NO: 2950 - protein, 17 aa, Arabidopsis thaliana
GRSGHSRLIASSLHPLK

SEQ ID NO: 2951 - DNA, 177 bp, Arabidopsis thaliana
  source 1..177: mol_type = genomic DNA
taatcgtcaatgcagaaaatgggagagtctacggggtgtgggaaaggaggactaatgattccaaatcataagtctgctaattcttataacctctcccttgagttgtctcttgttgactctgtttgggattgtaatgttcggaccatgaggtattcctatatacctgagtggttgtag

SEQ ID NO: 2952 - protein, 57 aa, Arabidopsis thaliana
SSMQKMGESTGCGKGGLMIPNHKSANSYNLSLELSLVDSVWDCNVRTMRYSYIPEWL

SEQ ID NO: 2953 - DNA, 93 bp, Arabidopsis thaliana
  source 1..93: mol_type = genomic DNA
tgattccaaatcataagtctgctaattcttataacctctcccttgagttgtctcttgttgactctgtttgggattgtaatgttcggaccatga

SEQ ID NO: 2954 - protein, 29 aa, Arabidopsis thaliana
FQIISLLILITSPLSCLLLTLFGIVMFGP

SEQ ID NO: 2955 - DNA, 207 bp, Arabidopsis thaliana
  source 1..207: mol_type = genomic DNA
tagagtagttctttgagtcagctgcttctatgccattttctagagaaaatgggagagtctacggggtgtgggaaaggaggactaatgattccaaatcataagtctgctaattcttataacctctcccttgagttgtctcttgttgactctgtttgggattgtaatgttcggaccatgaggtattcctatatacctgagtggttgtag

SEQ ID NO: 2956 - protein, 67 aa, Arabidopsis thaliana
SSSLSQLLLCHFLEKMGESTGCGKGGLMIPNHKSANSYNLSLELSLVDSVWDCNVRTMRYSYIPEWL

SEQ ID NO: 2957 - DNA, 93 bp, Arabidopsis thaliana; identical to SEQ ID NO: 2953
  source 1..93: mol_type = genomic DNA

SEQ ID NO: 2958 - protein, 29 aa, Arabidopsis thaliana
FQIISLLILITSPLSCLLLTLFGIVMFGP

SEQ ID NO: 2959 - DNA, 69 bp, Arabidopsis thaliana
  source 1..69: mol_type = genomic DNA
tagttctttgagtcagctgcttctatgccattttctagaggtttggatccaatttcatcatcttgttga

SEQ ID NO: 2960 - protein, 21 aa, Arabidopsis thaliana
FFESAASMPFSRGLDPISSSC

SEQ ID NO: 2961 - DNA, 225 bp, Arabidopsis thaliana; identical to SEQ ID NO: 2947
  source 1..225: mol_type = genomic DNA

SEQ ID NO: 2962 - protein, 73 aa, Arabidopsis thaliana; identical to SEQ ID NO: 2948

SEQ ID NO: 2963 - DNA, 57 bp, Arabidopsis thaliana; identical to SEQ ID NO: 2949
  source 1..57: mol_type = genomic DNA

SEQ ID NO: 2964 - protein, 17 aa, Arabidopsis thaliana
GRSGHSRLIASSLHPLK

SEQ ID NO: 2965 - DNA, 51 bp, Arabidopsis thaliana
  source 1..51: mol_type = genomic DNA
tgatcaggcattagcttgtttgttgtatcttctatcttgtgttattgttga

SEQ ID NO: 2966 - protein, 15 aa, Arabidopsis thaliana
SGISLFVVSSILCYC

SEQ ID NO: 2967 - DNA, 105 bp, Arabidopsis thaliana
  source 1..105: mol_type = genomic DNA
tgagaggagagagagagagagaagcatcccagaaaacgacattctgttcatatggagttttttcaccagatcgagagcacgaagaagatgattactgggttttga

SEQ ID NO: 2968 - protein, 33 aa, Arabidopsis thaliana
EEREREKHPRKRHSVHMEFFHQIESTKKMITGF

SEQ ID NO: 2969 - DNA, 99 bp, Arabidopsis thaliana
  source 1..99: mol_type = genomic DNA
tagctaagacctttaatggtttcctctctctctctatctctacctggctttgtaatttgtttaccgactacaatggtcaaaatttctctactcctataa

SEQ ID NO: 2970 - protein, 31 aa, Arabidopsis thaliana
LRPLMVSSLSLSLPGFVICLPTTMVKISLLL

SEQ ID NO: 2971 - DNA, 219 bp, Arabidopsis thaliana
  source 1..219: mol_type = genomic DNA
taacccaatggaggcaatgaagatgagactctttgtggcggttttggtggcagcgatggctttctctgcggtgcaacaggctgccgcggtggaggctccagctccgagtcctacctccgatgcttccttggccatccccgctttcttcgcctcggtagccactttggcctttgggtttctcttctagacaaatttgtttttgtctttttaatgttataa

SEQ ID NO: 2972 - protein, 71 aa, Arabidopsis thaliana
PNGGNEDETLCGGFGGSDGFLCGATGCRGGGSSSESYLRCFLGHPRFLRLGSHFGLWVSLLDKFVFVFLML

SEQ ID NO: 2973 - DNA, 84 bp, Arabidopsis thaliana
  source 1..84: mol_type = genomic DNA
tgagagaggtattatagaaaatactctgctcgttctcctccacatatccaagactttggagataatgctggtatccttggctag

SEQ ID NO: 2974 - protein, 26 aa, Arabidopsis thaliana
ERYYRKYSARSPPHIQDFGDNAGILG

SEQ ID NO: 2975 - DNA, 51 bp, Arabidopsis thaliana
  source 1..51: mol_type = genomic DNA
tagaaaatactctgctcgttctcctccacatatccaagactttggagataa

SEQ ID NO: 2976 - protein, 15 aa, Arabidopsis thaliana
KILCSFSSTYPRLWR

SEQ ID NO: 2977 - DNA, 54 bp, Arabidopsis thaliana
  source 1..54: mol_type = genomic DNA
taacaccaaaagagagaagcaaatctcaaattcttcccctattattatatgtga

SEQ ID NO: 2978 - protein, 16 aa, Arabidopsis thaliana
HQKREANLKFFPYYYM

SEQ ID NO: 2979 - DNA, 252 bp, Arabidopsis thaliana
  source 1..252: mol_type = genomic DNA
taatctttttttccggcgttcgatttgaaaaaatccggggaacaggtgatcggaatcacggctatacacgggatatcacggggtgttagctcacatgtccatattgtccgacagaagggttgtttaatcgaaactaatcctttgccgcacggaggacgtggagctctgccgtctgaaggcggcagcccttccgatctcctctttctcgccggtggcggttccagctttaacttcttttcctttaggttttag

SEQ ID NO: 2980 - protein, 82 aa, Arabidopsis thaliana
SFFPAFDLKKSGEQVIGITAIHGISRGVSSHVHIVRQKGCLIETNPLPHGGRGALPSEGGSPSDLLFLAGGGSSFNFFSFRF

SEQ ID NO: 2981 - DNA, 135 bp, Arabidopsis thaliana
  source 1..135: mol_type = genomic DNA
taatcgaaactaatcctttgccgcacggaggacgtggagctctgccgtctgaaggcggcagcccttccgatctcctctttctcgccggtggcggttccagctttaacttcttttcctttaggttttaggagttag

SEQ ID NO: 2982 - protein, 43 aa, Arabidopsis thaliana
SKLILCRTEDVELCRLKAAALPISSFSPVAVPALTSFPLGFRS

SEQ ID NO: 2983 - DNA, 57 bp, Arabidopsis thaliana
  source 1..57: mol_type = genomic DNA
tgaaggcggcagcccttccgatctcctctttctcgccggtggcggttccagctttaa

SEQ ID NO: 2984 - protein, 17 aa, Arabidopsis thaliana
RRQPFRSPLSRRWRFQL

SEQ ID NO: 2985 - DNA, 72 bp, Arabidopsis thaliana
  source 1..72: mol_type = genomic DNA
taagttactgaagggagaaaccggtggcgatttgttgcgtctttatttccagagctcaccaaactttgctga

SEQ ID NO: 2986 - protein, 22 aa, Arabidopsis thaliana
VTEGRNRWRFVASLFPELTKLC

SEQ ID NO: 2987 - DNA, 99 bp, Arabidopsis thaliana
  source 1..99: mol_type = genomic DNA
tgattttttaagtgcaagacgacaagtgatgaaaagatagagacaaagaaaggcttcaagtttgttgataactgctgtctaaagagttcgttcccttga

SEQ ID NO: 2988 - protein, 31 aa, Arabidopsis thaliana
FFKCKTTSDEKIETKKGFKFVDNCCLKSSFP

SEQ ID NO: 2989 - DNA, 78 bp, Arabidopsis thaliana
  source 1..78: mol_type = genomic DNA
tgatcgattctctattttttggaatctgattcatatgtttggggtttaatagtttcagctcaaagaaatctgggttaa

SEQ ID NO: 2990 - protein, 24 aa, Arabidopsis thaliana
SILYFLESDSYVWGLIVSAQRNLG

SEQ ID NO: 2991 - DNA, 63 bp, Arabidopsis thaliana
  source 1..63: mol_type = genomic DNA
tgattcatatgtttggggtttaatagtttcagctcaaagaaatctgggttaaagtgtgtttga

SEQ ID NO: 2992 - protein, 19 aa, Arabidopsis thaliana
FICLGFNSFSSKKSGLKCV

SEQ ID NO: 2993 - DNA, 51 bp, Arabidopsis thaliana
  source 1..51: mol_type = genomic DNA
taaagtgtgtttgaaattgtggatcgattcatagattctcgataccaatag

SEQ ID NO: 2994 - protein, 15 aa, Arabidopsis thaliana
SVFEIVDRFIDSRYQ

SEQ ID NO: 2995 - DNA, 57 bp, Arabidopsis thaliana
  source 1..57: mol_type = genomic DNA
tgatacgtttgtaatctcgtgccatatctttggtttgtcaaagagagtgtgttttaa

SEQ ID NO: 2996 - protein, 17 aa, Arabidopsis thaliana
YVCNLVPYLWFVKESVF

SEQ ID NO: 2997 - DNA, 165 bp, Arabidopsis thaliana
  source 1..165: mol_type = genomic DNA
tgagtgaaactttattcctcttcatcatcgacatccttctctttcttcaattcggtaagatttcttggagcagactctagatcgattttaaaccaattgttattttttgttgttgtcgggtgtgtttttatgtcaatctcttgctctcattgctggcctgggtaa

SEQ ID NO: 2998 - protein, 53 aa, Arabidopsis thaliana
VKLYSSSSSTSFSFFNSVRFLGADSRSILNQLLFFVVVGCVFMSISCSHCWPG

SEQ ID NO: 2999 - DNA, 54 bp, Arabidopsis thaliana
  source 1..54: mol_type = genomic DNA
tgaaactttattcctcttcatcatcgacatccttctctttcttcaattcggtaa

SEQ ID NO: 3000 - protein, 16 aa, Arabidopsis thaliana
NFIPLHHRHPSLSSIR

SEQ ID NO: 3001 - DNA, 87 bp, Arabidopsis thaliana
  source 1..87: mol_type = genomic DNA
taaaccaattgttattttttgttgttgtcgggtgtgtttttatgtcaatctcttgctctcattgctggcctgggtaaccaagtttga

SEQ ID NO: 3002 - protein, 27 aa, Arabidopsis thaliana
TNCYFLLLSGVFLCQSLALIAGLGNQV

SEQ ID NO: 3003 - DNA, 165 bp, Arabidopsis thaliana; identical to SEQ ID NO: 2997
  source 1..165: mol_type = genomic DNA

SEQ ID NO: 3004 - protein, 53 aa, Arabidopsis thaliana; identical to SEQ ID NO: 2998

SEQ ID NO: 3005 - DNA, 87 bp, Arabidopsis thaliana; identical to SEQ ID NO: 3001
  source 1..87: mol_type = genomic DNA

SEQ ID NO: 3006 - protein, 27 aa, Arabidopsis thaliana
TNCYFLLLSGVFLCQSLALIAGLGNQV

SEQ ID NO: 3007 - DNA, 75 bp, Arabidopsis thaliana
  source 1..75: mol_type = genomic DNA
tagttgattagtgcaagacgacaagtgatgaaaagacagacaaaggcttcaagtttgttgataactgctgtctaa

SEQ ID NO: 3008 - protein, 23 aa, Arabidopsis thaliana
LISARRQVMKRQTKASSLLITAV

SEQ ID NO: 3009 - DNA, 81 bp, Arabidopsis thaliana
  source 1..81: mol_type = genomic DNA
tagtgcaagacgacaagtgatgaaaagacagacaaaggcttcaagtttgttgataactgctgtctaaggagtttcccttga

SEQ ID NO: 3010 - protein, 25 aa, Arabidopsis thaliana
CKTTSDEKTDKGFKFVDNCCLRSFP

SEQ ID NO: 3011 - DNA, 126 bp, Arabidopsis thaliana
  source 1..126: mol_type = genomic DNA
tgagtgaaactttattcctcttcatcatcgacatccttctctttcttcaattcgttgattagtgcaagacgacaagtgatgaaaagacagacaaaggcttcaagtttgttgataactgctgtctaa

SEQ ID NO: 3012 - protein, 40 aa, Arabidopsis thaliana
VKLYSSSSSTSFSFFNSLISARRQVMKRQTKASSLLITAV

SEQ ID NO: 3013 - DNA, 78 bp, Arabidopsis thaliana
  source 1..78: mol_type = genomic DNA
tgactccctctccgacgaaaatggtgtccacgagcaagatcaaatccgttgatttctatagcgatcctgaagttgtag

SEQ ID NO: 3014 - protein, 24 aa, Arabidopsis thaliana
LPLRRKWCPRARSNPLISIAILKL

SEQ ID NO: 3015 - DNA, 78 bp, Arabidopsis thaliana
  source 1..78: mol_type = genomic DNA
tagccaagcagctgttgtttcttagttgactccctctccgacgaaaatggtgtccacgagcaagatcaaatccgttga

SEQ ID NO: 3016 - protein, 24 aa, Arabidopsis thaliana
PSSCCFLVDSLSDENGVHEQDQIR

SEQ ID NO: 3017 - DNA, 117 bp, Arabidopsis thaliana
  source 1..117: mol_type = genomic DNA
taaagagtcctttatactctccctgtttttgggtgcttcgctcgctcactgatttttgattcgtcggaaaatctattttcgagctcggatttatgtaattccttattctccttctga

SEQ ID NO: 3018 - protein, 37 aa, Arabidopsis thaliana
RVLYTLPVFGCFARSLIFDSSENLFSSSDLCNSLFSF

SEQ ID NO: 3019 - DNA, 90 bp, Arabidopsis thaliana
  source 1..90: mol_type = genomic DNA
tgatttttgattcgtcggaaaatctattttcgagctcggatttatgtaattccttattctccttctgattgcgattgttgtgttcattaa

SEQ ID NO: 3020 - protein, 28 aa, Arabidopsis thaliana
FLIRRKIYFRARIYVIPYSPSDCDCCVH

SEQ ID NO: 3021 - DNA, 66 bp, Arabidopsis thaliana
  source 1..66: mol_type = genomic DNA
taattccttattctccttctgattgcgattgttgtgttcattaagggttgttgggatatcgattaa

SEQ ID NO: 3022 - protein, 20 aa, Arabidopsis thaliana
FLILLLIAIVVFIKGCWDID

SEQ ID NO: 3023 - DNA, 63 bp, Arabidopsis thaliana
  source 1..63: mol_type = genomic DNA
taatggaactcttcttccaccattttcctggaaaatctcggtatcgagaagatgaatccctag

SEQ ID NO: 3024 - protein, 19 aa, Arabidopsis thaliana
WNSSSTIFLENLGIEKMNP

SEQ ID NO: 3025 - DNA, 102 bp, Arabidopsis thaliana
  source 1..102: mol_type = genomic DNA
tagattttaaatataactacaacttcttgcttactttgtgatgcggaaactcaaaaccgtaatcactcatgttatattttttgttgttgctttcaacgctaa

SEQ ID NO: 3026 - protein, 32 aa, Arabidopsis thaliana
ILNITTTSCLLCDAETQNRNHSCYIFCCCFQR

SEQ ID NO: 3027 - DNA, 294 bp, Arabidopsis thaliana
  source 1..294: mol_type = genomic DNA
taaaccattttcgttctttcttcttttaacaagaaaccaccgctctgtacaaaacaaagtctccgtcgtttcttctccgttctccggtcaattcgaattcctcagagagaaatttgtgctcgcgagttccgcgtgaaatacatggaaatgttggcggcgttggactcgcgttcttctctccatcttcatcgttccatgtctcgcgttgacctttttgccggtgttcgtatgaaaccatctcctacaagtcctgttccgaatacgcctcgaatatgtggaagtaaactctgttga

SEQ ID NO: 3028 - protein, 96 aa, Arabidopsis thaliana
TIFVLSSFNKKPPLCTKQSLRRFFSVLRSIRIPQREICAREFRVKYMEMLAALDSRSSLHLHRSMSRVDLFAGVRMKPSPTSPVPNTPRICGSKLC

SEQ ID NO: 3029 - DNA, 78 bp, Arabidopsis thaliana
  source 1..78: mol_type = genomic DNA
tgacctttttgccggtgttcgtatgaaaccatctcctacaagtcctgttccgaatacgcctcgaatatgtggaagtaa

SEQ ID NO: 3030 - protein, 24 aa, Arabidopsis thaliana
PFCRCSYETISYKSCSEYASNMWK

SEQ ID NO: 3031 - DNA, 294 bp, Arabidopsis thaliana; identical to SEQ ID NO: 3027
  source 1..294: mol_type = genomic DNA

SEQ ID NO: 3032 - protein, 96 aa, Arabidopsis thaliana; identical to SEQ ID NO: 3028

SEQ ID NO: 3033 - DNA, 78 bp, Arabidopsis thaliana; identical to SEQ ID NO: 3029
  source 1..78: mol_type = genomic DNA

SEQ ID NO: 3034 - protein, 24 aa, Arabidopsis thaliana
PFCRCSYETISYKSCSEYASNMWK

SEQ ID NO: 3035 - DNA, 264 bp, Arabidopsis thaliana
  source 1..264: mol_type = genomic DNA
taatctaaaaagcgagatttccttctttcgattcttttttctcaatctggttttcagtcttcggattcaatggcgtctggatcttcgggtcgggtcaactcaggatccaaaggtttcgattttggctccgatgatatcctttgctcttatgatgactacaccaaccaagactcctctaatggtcctcactccgatcctgcgatcgctgcttccaactccaacaaggttaaccacactgatttacccttttcttcctttttttag

SEQ ID NO: 3036 - protein, 86 aa, Arabidopsis thaliana
SKKRDFLLSILFSQSGFQSSDSMASGSSGRVNSGSKGFDFGSDDILCSYDDYTNQDSSNGPHSDPAIAASNSNKVNHTDLPFSSFF

SEQ ID NO: 3037 - DNA, 54 bp, Arabidopsis thaliana
  source 1..54: mol_type = genomic DNA
taatggtcctcactccgatcctgcgatcgctgcttccaactccaacaaggttaa

SEQ ID NO: 3038 - protein, 16 aa, Arabidopsis thaliana
WSSLRSCDRCFQLQQG

SEQ ID NO: 3039 - DNA, 63 bp, Arabidopsis thaliana
  source 1..63: mol_type = genomic DNA
taaaagaagaaaaggaaaagaaatggagaagggaagaggcaagatggcaaagctgtgatttaa

SEQ ID NO: 3040 - protein, 19 aa, Arabidopsis thaliana
KKKRKRNGEGKRQDGKAVI

SEQ ID NO: 3041 - DNA, 63 bp, Arabidopsis thaliana; identical to SEQ ID NO: 3039
  source 1..63: mol_type = genomic DNA

SEQ ID NO: 3042 - protein, 19 aa, Arabidopsis thaliana
KKKRKRNGEGKRQDGKAVI

SEQ ID NO: 3043 - DNA, 54 bp, Arabidopsis thaliana
  source 1..54: mol_type = genomic DNA
tgaatcggctattcgggaaacccaagcaggaggctaatgctctccaaactttag

SEQ ID NO: 3044 - protein, 16 aa, Arabidopsis thaliana
IGYSGNPSRRLMLSKL

SEQ ID NO: 3045 - DNA, 69 bp, Arabidopsis thaliana
  source 1..69: mol_type = genomic DNA
tagaagagatcgaagtgggagcaaaatcatgatgaatcggctattcgggaaacccaagcaggaggctaa

SEQ ID NO: 3046 - protein, 21 aa, Arabidopsis thaliana
KRSKWEQNHDESAIRETQAGG

SEQ ID NO: 3047 - DNA, 153 bp, Arabidopsis thaliana
  source 1..153: mol_type = genomic DNA
taatctctgtgtttccttcttttgatctttttggcaagatctctatttttcttccaaaaaaggaaaaataaaaagatcataacttcagaatcaaagtttctctttgttcacattgttctatccatctgcacatttgattcatgtagtgactaa

SEQ ID NO: 3048 - protein, 49 aa, Arabidopsis thaliana
SLCFLLLIFLARSLFFFQKRKNKKIITSESKFLFVHIVLSICTFDSCSD

SEQ ID NO: 3049 - DNA, 51 bp, Arabidopsis thaliana
  source 1..51: mol_type = genomic DNA
tgaagaaataaacagttgatgggttcttcgcttcttctcttgttgggttag

SEQ ID NO: 3050 - protein, 15 aa, Arabidopsis thaliana
RNKQLMGSSLLLLLG

SEQ ID NO: 3051 - DNA, 189 bp, Arabidopsis thaliana
  source 1..189: mol_type = genomic DNA
tgatcactagtcctagttttctgctacttgtctcatagacttctcacacacaaaaagaagagaaaaggaaaatccaaaatttttaattttttcaatatcaattttgtttgtaatgggcacccaaaggaaaatcaatcaattatgtggtttcttaagtcttttggtcagagggtttcatacatggaataa

SEQ ID NO: 3052 - protein, 61 aa, Arabidopsis thaliana
SLVLVFCYLSHRLLTHKKKRKGKSKIFNFFNINFVCNGHPKENQSIMWFLKSFGQRVSYME

SEQ ID NO: 3053 - DNA, 54 bp, Arabidopsis thaliana
  source 1..54: mol_type = genomic DNA
tagcatttttcatcgccggcgaaacattttttaccaattctccagcttggctaa

SEQ ID NO: 3054 - protein, 16 aa, Arabidopsis thaliana
HFSSPAKHFLPILQLG

SEQ ID NO: 3055 - DNA, 54 bp, Arabidopsis thaliana
  source 1..54: mol_type = genomic DNA
tgacttcaccggtccctcctccgattagaaatggctttaagagacttttggtga

SEQ ID NO: 3056 - protein, 16 aa, Arabidopsis thaliana
LHRSLLRLEMALRDFW

SEQ ID NO: 3057 - DNA, 51 bp, Arabidopsis thaliana
  source 1..51: mol_type = genomic DNA
tgactccaccggtccctccaccgtgacttcaccggtccctcctccgattag

SEQ ID NO: 3058 - protein, 15 aa, Arabidopsis thaliana
LHRSLHRDFTGPSSD

SEQ ID NO: 3059 - DNA, 135 bp, Arabidopsis thaliana
  source 1..135: mol_type = genomic DNA
tgatcaaagggcatgactttcacagattttccagcaaaagtcgtcaaatgtccaagactcattttctccactgttgttgttgataagagtctgaaacaacaaggtcacgacgacgatgagctgctgctgatgtga

SEQ ID NO: 3060 - protein, 43 aa, Arabidopsis thaliana
SKGMTFTDFPAKVVKCPRLIFSTVVVDKSLKQQGHDDDELLLM

SEQ ID NO: 3061 - DNA, 120 bp, Arabidopsis thaliana
  source 1..120: mol_type = genomic DNA
taagtaagggaatgcagagagatggtcggagtatcgccggtgaagactaagctgtgtgatcggtttaaccgatccgtcggcggcaggaattgccaccggaaacacgtcgaggacgggtga

SEQ ID NO: 3062 - protein, 38 aa, Arabidopsis thaliana
VRECREMVGVSPVKTKLCDRFNRSVGGRNCHRKHVEDG

SEQ ID NO: 3063 - DNA, 93 bp, Arabidopsis thaliana
  source 1..93: mol_type = genomic DNA
tgaagactaagctgtgtgatcggtttaaccgatccgtcggcggcaggaattgccaccggaaacacgtcgaggacgggtgatccagttttctaa

SEQ ID NO: 3064 - protein, 29 aa, Arabidopsis thaliana
RLSCVIGLTDPSAAGIATGNTSRTGDPVF

SEQ ID NO: 3065 - DNA, 123 bp, Arabidopsis thaliana
  source 1..123: mol_type = genomic DNA
tgatgggattatctttctaaagctttttgttttcctgaaaaattaaaaaagaaaacttttatggttcttcttctcttctgtgttggagttgagagaccaataaatgctgttagtaatggttag

SEQ ID NO: 3066 - protein, 39 aa, Arabidopsis thaliana
WDYLSKAFCFPEKLKKKTFMVLLLFCVGVERPINAVSNG

SEQ ID NO: 3067 - DNA, 66 bp, Arabidopsis thaliana
  source 1..66: mol_type = genomic DNA
taaatccgtcttctcatctctttccatttgtggaattcaatggaagctttaggtttttggtgctga

SEQ ID NO: 3068 - protein, 20 aa, Arabidopsis thaliana
IRLLISFHLWNSMEALGFWC

SEQ ID NO: 3069 - DNA, 174 bp, Arabidopsis thaliana
  source 1..174: mol_type = genomic DNA
taaactgttaagattgagagagagcgaacaaaaaaaaaaaaaagagagagcggagagaagaaaaaaaaccctagcgtgttgttcagtgactttggggggaaaatttctcgtagtttcttcgctaaatccgtcttctcatctctttccatttgtggaattcaatggaagctttag

SEQ ID NO: 3070 - protein, 56 aa, Arabidopsis thaliana
TVKIERERTKKKKRESGEKKKNPSVLFSDFGGKISRSFFAKSVFSSLSICGIQWKL

SEQ ID NO: 3071 - DNA, 66 bp, Arabidopsis thaliana; identical to SEQ ID NO: 3067
  source 1..66: mol_type = genomic DNA

SEQ ID NO: 3072 - protein, 20 aa, Arabidopsis thaliana
IRLLISFHLWNSMEALGFWC

SEQ ID NO: 3073 - DNA, 66 bp, Arabidopsis thaliana
  source 1..66: mol_type = genomic DNA
tgaatccttgttaatctttttcttcaatctctcgatctgatcgttatcgaaaccgcgcgattctaa

SEQ ID NO: 3074 - protein, 20 aa, Arabidopsis thaliana
ILVNLFLQSLDLIVIETARF

SEQ ID NO: 3075 - DNA, 69 bp, Arabidopsis thaliana
  source 1..69: mol_type = genomic DNA
taatctttttcttcaatctctcgatctgatcgttatcgaaaccgcgcgattctaaccaagtccaggtga

SEQ ID NO: 3076 - protein, 21 aa, Arabidopsis thaliana
SFSSISRSDRYRNRAILTKSR

SEQ ID NO: 3077 - DNA, 51 bp, Arabidopsis thaliana
  source 1..51: mol_type = genomic DNA
tgaatgttagacagagaggcaaaaactaatcaaagtgtttctaatccctga

SEQ ID NO: 3078 - protein, 15 aa, Arabidopsis thaliana
MLDREAKTNQSVSNP

SEQ ID NO: 3079 - DNA, 57 bp, Arabidopsis thaliana
  source 1..57: mol_type = genomic DNA
tgatccatcatctctctctctttctctcttctctctgttcctagtccatcgatttaa

SEQ ID NO: 3080 - protein, 17 aa, Arabidopsis thaliana
SIISLSFSLLSVPSPSI

SEQ ID NO: 3081 - DNA, 126 bp, Arabidopsis thaliana
  source 1..126: mol_type = genomic DNA
tgacattttaagaaagtgattatatataagattttcttgattctgatttatctttttttttggtcggaagatcttaaagatatgaaaatggattcgtgtcataaacagaggcagctccgtacgtga

SEQ ID NO: 3082 - protein, 40 aa, Arabidopsis thaliana
HFKKVIIYKIFLILIYLFFWSEDLKDMKMDSCHKQRQLRT

SEQ ID NO: 3083 - DNA, 93 bp, Arabidopsis thaliana
  source 1..93: mol_type = genomic DNA
tgaaagtacactgttctttcacggagaaagaagataaataagcattatcttcttcttcagtttttaacacacattttggaaattttgatgtaa

SEQ ID NO: 3084 - protein, 29 aa, Arabidopsis thaliana
KYTVLSRRKKINKHYLLLQFLTHILEILM

SEQ ID NO: 3085 - DNA, 81 bp, Arabidopsis thaliana
  source 1..81: mol_type = genomic DNA
tgatacccacacaaggggattttctatattaaatatactttggaattatcctttcgttatattagtggtcatgggtcttga

SEQ ID NO: 3086 - protein, 25 aa, Arabidopsis thaliana
YPHKGIFYIKYTLELSFRYISGHGS

SEQ ID NO: 3087 - DNA, 66 bp, Arabidopsis thaliana
  source 1..66: mol_type = genomic DNA
tagaggtgcccaagaagcttctcttctctctctctctctctcttcaatgccctcctctgctactag

SEQ ID NO: 3088 - protein, 20 aa, Arabidopsis thaliana
RCPRSFSSLSLSLFNALLCY

SEQ ID NO: 3089 - DNA, 54 bp, Arabidopsis thaliana
  source 1..54: mol_type = genomic DNA
taagcaaatgggtttttcacgatgactctccttgttgttggggagattcaataa

SEQ ID NO: 3090 - protein, 16 aa, Arabidopsis thaliana
ANGFFTMTLLVVGEIQ

SEQ ID NO: 3091 - DNA, 315 bp, Arabidopsis thaliana
  source 1..315: mol_type = genomic DNA
taaaggctcaaattcatccacgtcacaccgttgttcatttcctctgatgtcttggtgtcgttagatattgtctcccaaaaaagaaatcttcttgacacagagattgaagtcgcaaagagacagaggaaagagggggagaaaatggatcgaccagcagtgagtggtccaatggatttgccgattatgcacgatagtgataggtatgaactcgtcaaggatattggctccggtaattttggagttgcgagattgatgagagacaagcaaagtaatgagcttgttgctgttaaatatatcgagagagtgttgttttaa

SEQ ID NO: 3092 - protein, 103 aa, Arabidopsis thaliana
RLKFIHVTPLFISSDVLVSLDIVSQKRNLLDTEIEVAKRQRKEGEKMDRPAVSGPMDLPIMHDSDRYELVKDIGSGNFGVARLMRDKQSNELVAVKYIERVLF

SEQ ID NO: 3093 - DNA, 93 bp, Arabidopsis thaliana
  source 1..93: mol_type = genomic DNA
taaccactgcacgtttccatagagaggaaagatgagtctctctccgagagattttctctctatcatcttatcttcttccgtgtaatgctctga

SEQ ID NO: 3094 - protein, 29 aa, Arabidopsis thaliana
PLHVSIERKDESLSERFSLYHLIFFRVML

SEQ ID NO: 3095 - DNA, 66 bp, Arabidopsis thaliana
  source 1..66: mol_type = genomic DNA
tagagaggaaagatgagtctctctccgagagattttctctctatcatcttatcttcttccgtgtaa

SEQ ID NO: 3096 - protein, 20 aa, Arabidopsis thaliana
RGKMSLSPRDFLSIILSSSV

SEQ ID NO: 3097 - DNA, 81 bp, Arabidopsis thaliana
  source 1..81: mol_type = genomic DNA
tgattagttactatttttctgcaattctgtttcttctctgtacatcaccaacaacatttaaattccaatggcgcattttaa

SEQ ID NO: 3098 - protein, 25 aa, Arabidopsis thaliana
LVTIFLQFCFFSVHHQQHLNSNGAF

SEQ ID NO: 3099 - DNA, 63 bp, Arabidopsis thaliana
  source 1..63: mol_type = genomic DNA
tgagcttcggagcaacggatctggtttgttgtcgtactcttcagggacacaccggaaaggtga

SEQ ID NO: 3100 - protein, 19 aa, Arabidopsis thaliana
ASEQRIWFVVVLFRDTPER

SEQ ID NO: 3101 - DNA, 93 bp, Arabidopsis thaliana
  source 1..93: mol_type = genomic DNA
tgaataccagttctgatccattgtcatgcttcaacaatggcgaagctccttcgatgtgggactctcatgtgcagaatctctatggcaatttag

SEQ ID NO: 3102 - protein, 29 aa, Arabidopsis thaliana
IPVLIHCHASTMAKLLRCGTLMCRISMAI

SEQ ID NO: 3103 - DNA, 72 bp, Arabidopsis thaliana
  source 1..72: mol_type = genomic DNA
taatctcctgatgacaaaactctctgctactcactttgtttccgtaaatatcacttctttcgagtgacctaa

SEQ ID NO: 3104 - protein, 22 aa, Arabidopsis thaliana
SPDDKTLCYSLCFRKYHFFRVT

SEQ ID NO: 3105 - DNA, 165 bp, Arabidopsis thaliana
  source 1..165: mol_type = genomic DNA
tgatgcttaatcagcagttcttggtgtttgagacacatgtctccaataatactcagtgagatctttctctctgggtttatgttaaattccacaatcaggcgcaggacccatcttgttcaatctttctctgttgtcttcctttactggctttactatgtctcatga

SEQ ID NO: 3106 - protein, 53 aa, Arabidopsis thaliana
CLISSSWCLRHMSPIILSEIFLSGFMLNSTIRRRTHLVQSFSVVFLYWLYYVS

SEQ ID NO: 3107 - DNA, 90 bp, Arabidopsis thaliana
  source 1..90: mol_type = genomic DNA
taaattccacaatcaggcgcaggacccatcttgttcaatctttctctgttgtcttcctttactggctttactatgtctcatgatctctga

SEQ ID NO: 3108 - protein, 28 aa, Arabidopsis thaliana
IPQSGAGPILFNLSLLSSFTGFTMSHDL

SEQ ID NO: 3109 - DNA, 288 bp, Arabidopsis thaliana
  source 1..288: mol_type = genomic DNA
taggtttccgtctctgttttttcttgcattttccccagaattccttcacattctctccttttcctctttttaattcctcaccacctcaaattcttcataaacaaatccacttctgcatggttgggagaatctgttagagaatttttgttgttgttgggttcagatttggaaaatttcctttttttcgagtttcttctgaattattcatcgtggagattctcggatcgggaagggctgcgagaggtggttttcacggcggggatagattcatcttctgtcttctcctga

SEQ ID NO: 3110 - protein, 94 aa, Arabidopsis thaliana
VSVSVFSCIFPRIPSHSLLFLFLIPHHLKFFINKSTSAWLGESVREFLLLLGSDLENFLFFEFLLNYSSWRFSDREGLREVVFTAGIDSSSVFS

SEQ ID NO: 3111 - DNA, 162 bp, Arabidopsis thaliana
  source 1..162: mol_type = genomic DNA
tagagaatttttgttgttgttgggttcagatttggaaaatttcctttttttcgagtttcttctgaattattcatcgtggagattctcggatcgggaagggctgcgagaggtggttttcacggcggggatagattcatcttctgtcttctcctgagggggtag

SEQ ID NO: 3112 - protein, 52 aa, Arabidopsis thaliana
RIFVVVGFRFGKFPFFRVSSELFIVEILGSGRAARGGFHGGDRFIFCLLLRG

SEQ ID NO: 3113 - DNA, 288 bp, Arabidopsis thaliana; identical to SEQ ID NO: 3109
  source 1..288: mol_type = genomic DNA

SEQ ID NO: 3114 - protein, 94 aa, Arabidopsis thaliana; identical to SEQ ID NO: 3110

SEQ ID NO: 3115 - DNA, 162 bp, Arabidopsis thaliana; identical to SEQ ID NO: 3111
  source 1..162: mol_type = genomic DNA

SEQ ID NO: 3116 - protein, 52 aa, Arabidopsis thaliana; identical to SEQ ID NO: 3112

SEQ ID NO: 3117 - DNA, 132 bp, Arabidopsis thaliana
  source 1..132: mol_type = genomic DNA
tagtttagccgtgacacggctttccgttgccgcgttctttgtcgtccggtttcatgccggcttatgtaccaaatctccgcgatggtcagctctcgtctagcaccgcttagcttcttcagcaacggtggctag

SEQ ID NO: 3118 - protein, 42 aa, Arabidopsis thaliana
FSRDTAFRCRVLCRPVSCRLMYQISAMVSSRLAPLSFFSNGG

SEQ ID NO: 3119 - DNA, 87 bp, Arabidopsis thaliana
  source 1..87: mol_type = genomic DNA
tgaaaacgaagtttaaaaaaaaaaaaaaaaaaaataaaaagaagaaaaaaaaggaagaagaagaccaagaaattgaggtgcatgtga

SEQ ID NO: 3120 - protein, 27 aa, Arabidopsis thaliana
KRSLKKKKKKIKRRKKRKKKTKKLRCM

SEQ ID NO: 3121 - DNA, 75 bp, Arabidopsis thaliana
  source 1..75: mol_type = genomic DNA
taattttttaaaaaaaaaaaaaaaaaaaaaagaaaaaaaaggaagaagaagaccaagaaattgaggtgcatgtga

SEQ ID NO: 3122 - protein, 23 aa, Arabidopsis thaliana
FFKKKKKKKRKKRKKKTKKLRCM

SEQ ID NO: 3123 - DNA, 51 bp, Arabidopsis thaliana
  source 1..51: mol_type = genomic DNA
tagtacgttcatgtcttttctccggccaccgaaacgatgccatctgtttag

SEQ ID NO: 3124 - protein, 15 aa, Arabidopsis thaliana
YVHVFSPATETMPSV

SEQ ID NO: 3125 - DNA, 75 bp, Arabidopsis thaliana
  source 1..75: mol_type = genomic DNA
tgaagatctagatctgggtccagacaaatttcaccgacccagctctttcacatatgtagacctctctctctctaa

SEQ ID NO: 3126 - protein, 23 aa, Arabidopsis thaliana
RSRSGSRQISPTQLFHICRPLSL

SEQ ID NO: 3127 - DNA, 96 bp, Arabidopsis thaliana
  source 1..96: mol_type = genomic DNA
taatacacagatagagagaagagacagagacagagagtgatggaaacagctgtatttattatgagacgaaacaagaacctctgggtttctacttaa

SEQ ID NO: 3128 - protein, 30 aa, Arabidopsis thaliana
YTDREKRQRQRVMETAVFIMRRNKNLWVST

SEQ ID NO: 3129 - DNA, 237 bp, Arabidopsis thaliana
  source 1..237: mol_type = genomic DNA
taattaagtaaaaagattataaaagatgagaaggagaagatagcttcttcatcgagaaacctcgaaatcaaaaagcacgtcggtgacttgtactcttcaatctcttcttcctctctttcacatctccttctctcgaacccatcgacctgcgctaattcatcatcgaccttgctcaaattcatcaaccatgtcttacgattatctcttcaagtacataatcatcggagacacaggtga

SEQ ID NO: 3130 - protein, 77 aa, Arabidopsis thaliana
LSKKIIKDEKEKIASSSRNLEIKKHVGDLYSSISSSSLSHLLLSNPSTCANSSSTLLKFINHVLRLSLQVHNHRRHR

SEQ ID NO: 3131 - DNA, 222 bp, Arabidopsis thaliana
  source 1..222: mol_type = genomic DNA
tagcttcttcatcgagaaacctcgaaatcaaaaagcacgtcggtgacttgtactcttcaatctcttcttcctctctttcacatctccttctctcgaacccatcgacctgcgctaattcatcatcgaccttgctcaaattcatcaaccatgtcttacgattatctcttcaagtacataatcatcggagacacaggtgagagaccgatctttcacctttcttaa

SEQ ID NO: 3132 - protein, 72 aa, Arabidopsis thaliana
LLHRETSKSKSTSVTCTLQSLLPLFHISFSRTHRPALIHHRPCSNSSTMSYDYLFKYIIIGDTGERPIFHLS

SEQ ID NO: 3133 - DNA, 66 bp, Arabidopsis thaliana
  source 1..66: mol_type = genomic DNA
taattcatcatcgaccttgctcaaattcatcaaccatgtcttacgattatctcttcaagtacataa

SEQ ID NO: 3134 - protein, 20 aa, Arabidopsis thaliana
FIIDLAQIHQPCLTIISSST

SEQ ID NO: 3135 - DNA, 51 bp, Arabidopsis thaliana
  source 1..51: mol_type = genomic DNA
taactctcccttcacagttgcatagaatcttcttctctgctcatattttga

SEQ ID NO: 3136 - protein, 15 aa, Arabidopsis thaliana
LSLHSCIESSSLLIF

SEQ ID NO: 3137 - DNA, 63 bp, Arabidopsis thaliana
  source 1..63: mol_type = genomic DNA
taagatgtctcggtgttttccgttcccgccacctggttatgtactaaacggaatccgcgatga

SEQ ID NO: 3138 - protein, 19 aa, Arabidopsis thaliana
DVSVFSVPATWLCTKRNPR

SEQ ID NO: 3139 - DNA, 54 bp, Arabidopsis thaliana
  source 1..54: mol_type = genomic DNA
taactgatcacggccactttgttgttttcaatgtttatgggccgcgagctgtag

SEQ ID NO: 3140 - protein, 16 aa, Arabidopsis thaliana
LITATLLFSMFMGREL

SEQ ID NO: 3141 - DNA, 54 bp, Arabidopsis thaliana
  source 1..54: mol_type = genomic DNA
tgatcacggccactttgttgttttcaatgtttatgggccgcgagctgtagctga

SEQ ID NO: 3142 - protein, 16 aa, Arabidopsis thaliana
SRPLCCFQCLWAASCS

SEQ ID NO: 3143 - DNA, 159 bp, Arabidopsis thaliana
  source 1..159: mol_type = genomic DNA
taatggaaccaaattatgaggaagatgtttttctcgccaagtatcaatcatccgaacttaagattgcttctgaatttcttacgaattggttgcctttcttatctagagatctctgcaacgactgtgctcatgttctctccgatcgaatccgttctctag

SEQ ID NO: 3144 - protein, 51 aa, Arabidopsis thaliana
WNQIMRKMFFSPSINHPNLRLLLNFLRIGCLSYLEISATTVLMFSPIESVL

SEQ ID NO: 3145 - DNA, 162 bp, Arabidopsis thaliana
  source 1..162: mol_type = genomic DNA
tgatgggtttctcaatgttcttctcccccgaaaacgacgtcagccatcattcctctccatatgcttctgttgactgcactctctcacttggaactccctccactcgcctctgcaacgaggatgatgaacgtagattctcgtctcatacctccgacaccatag

SEQ ID NO: 3146 - protein, 52 aa, Arabidopsis thaliana
WVSQCSSPPKTTSAIIPLHMLLLTALSHLELPPLASATRMMNVDSRLIPPTP

SEQ ID NO: 3147 - DNA, 57 bp, Arabidopsis thaliana
  source 1..57: mol_type = genomic DNA
tgaggccggtcccatcgcacccctatcaggctccggaatcatcttcttttgtggtag

SEQ ID NO: 3148 - protein, 17 aa, Arabidopsis thaliana
GRSHRTPIRLRNHLLLW

SEQ ID NO: 3149 - DNA, 162 bp, Arabidopsis thaliana
  source 1..162: mol_type = genomic DNA
tgagagatttcaaaaggtcagtgtgtgagttttcgaattttcacaatgaatctaaaaaaagaagataaatttagtttcatttgtttcttaatcggagagaaatttgtatgccccaaaaacaaaaatgatgaattggtgtttgatgatgataattgtgtgtga

SEQ ID NO: 3150 - protein, 52 aa, Arabidopsis thaliana
EISKGQCVSFRIFTMNLKKEDKFSFICFLIGEKFVCPKNKNDELVFDDDNCV

SEQ ID NO: 3151 - DNA, 66 bp, Arabidopsis thaliana
  source 1..66: mol_type = genomic DNA
tgaattatagagataacagaaatggcgattaaacgttgttttctgctacttcgtcagctccaataa

SEQ ID NO: 3152 - protein, 20 aa, Arabidopsis thaliana
IIEITEMAIKRCFLLLRQLQ

SEQ ID NO: 3153 - DNA, 69 bp, Arabidopsis thaliana
  source 1..69: mol_type = genomic DNA
taaaatcttatatttcttttttcaatgttctctttgagatgtgagattttcacagtgttgtctccttaa

SEQ ID NO: 3154 - protein, 21 aa, Arabidopsis thaliana
NLIFLFSMFSLRCEIFTVLSP

SEQ ID NO: 3155 - DNA, 108 bp, Arabidopsis thaliana
  source 1..108: mol_type = genomic DNA
tgatcttcttcgcgtaatttcgctctcgtcaacagcgattcattcttctacgatctacatcgattagtccgtcctgaaagatcttttcgttttcagttaatgatgtag

SEQ ID NO: 3156 - protein, 34 aa, Arabidopsis thaliana
SSSRNFALVNSDSFFYDLHRLVRPERSFRFQLMM

SEQ ID NO: 3157 - DNA, 336 bp, Arabidopsis thaliana
  source 1..336: mol_type = genomic DNA
tgaaagaattatttctatacttcatcagccaatctcagtctcatcatctccgatgggaaaacccggcggcgcaaagaccagaaccgccgtatgtttatcagacggtgttttctttctcgccggagctttcatgtctctcactctcgtctggtcttacttctcaatcttttcaccttctttcaccagtttacgtcacgacggcaaaccggttcaatgctccggtttagacatgcaattcgacccatccgagcccggtttttacgacgacccggatctaagctactcgatcgagaaaccaatcacaaaatgggacgagaaacgaaaccaatggtttga

SEQ ID NO: 3158 - protein, 110 aa, Arabidopsis thaliana
KNYFYTSSANLSLIISDGKTRRRKDQNRRMFIRRCFLSRRSFHVSHSRLVLLLNLFTFFHQFTSRRQTGSMLRFRHAIRPIRARFLRRPGSKLLDRETNHKMGRETKPMV

SEQ ID NO: 3159 - DNA, 114 bp, Arabidopsis thaliana
  source 1..114: mol_type = genomic DNA
taatatcctctcaaaaaccctctcctatatcctcctaaagccccccttccttgtttctctaccgcaacaaagaaaaaacaaaagtttgagaaaaatggtgtgttcgttgtgtaa

SEQ ID NO: 3160 - protein, 36 aa, Arabidopsis thaliana
YPLKNPLLYPPKAPLPCFSTATKKKQKFEKNGVFVV

SEQ ID NO: 3161 - DNA, 84 bp, Arabidopsis thaliana
  source 1..84: mol_type = genomic DNA
tagaaacagtgtagccaaaagacaagcttcaaggagatgtatcattacggtgcttgtgactctaaaatggctccaccgacatga

SEQ ID NO: 3162 - protein, 26 aa, Arabidopsis thaliana
KQCSQKTSFKEMYHYGACDSKMAPPT

SEQ ID NO: 3163 - DNA, 93 bp, Arabidopsis thaliana
  source 1..93: mol_type = genomic DNA
tagataatcatatcgaacggagagagaacaatcaagctaggtaccagcgataaaaaggcggcgcatgtagagaacgtcgtcatctggatctga

SEQ ID NO: 3164 - protein, 29 aa, Arabidopsis thaliana
IIISNGERTIKLGTSDKKAAHVENVVIWI

SEQ ID NO: 3165 - DNA, 84 bp, Arabidopsis thaliana
  source 1..84: mol_type = genomic DNA
tgagcgagagagatgcagcgcgtagcagctttaaacgtgttaggaaggtctgtgaatagtctaaaatctacatcaaatgagtga

SEQ ID NO: 3166 - protein, 26 aa, Arabidopsis thaliana
AREMQRVAALNVLGRSVNSLKSTSNE

SEQ ID NO: 3167 - DNA, 300 bp, Arabidopsis thaliana
  source 1..300: mol_type = genomic DNA
tgagttcattcaggtcttgaagaagagcactcttttaagctgtgtgaaacttgcgccgttcctgtgaagaactacttttggcattgcagatttcagagagctgtgatttgtgctatcttaaaaacggacaagttctatgttgtggcggatgagatgagggatgctatctgggttgatgaattttctgaatgcctgtctctggccacggtcagatcagcaggctcgttctgcctcagattctggtggccgccaagagggtttgctctggttcagagactccggccagcacgtctttggtga

SEQ ID NO: 3168 - protein, 98 aa, Arabidopsis thaliana
VHSGLEEEHSFKLCETCAVPVKNYFWHCRFQRAVICAILKTDKFYVVADEMRDAIWVDEFSECLSLATVRSAGSFCLRFWWPPRGFALVQRLRPARLW

SEQ ID NO: 3169 - DNA, 153 bp, Arabidopsis thaliana
  source 1..153: mol_type = genomic DNA
tgatccatccgtagtcgtagtagatctacaagctctgaaattccacgcccacatctcctccgtcctcttgagatccttctcttcattcattttcttgctcaacttgagttgcttccaacatcttgcaaggtaaagtttccttttttttggtag

SEQ ID NO: 3170 - protein, 49 aa, Arabidopsis thaliana
SIRSRSRSTSSEIPRPHLLRPLEILLFIHFLAQLELLPTSCKVKFPFFW

SEQ ID NO: 3171 - DNA, 150 bp, Arabidopsis thaliana
  source 1..150: mol_type = genomic DNA
taaattttgtgtttggttgatccatccgtagtcgtagtagatctacaagctctgaaattccacgcccacatctcctccgtcctcttgagatccttctcttcattcattttcttgctcaacttgagttgcttccaacatcttgcaaggtaa

SEQ ID NO: 3172 - protein, 48 aa, Arabidopsis thaliana
ILCLVDPSVVVVDLQALKFHAHISSVLLRSFSSFIFLLNLSCFQHLAR

SEQ ID NO: 3173 - DNA, 300 bp, Arabidopsis thaliana; identical to SEQ ID NO: 3167
  source 1..300: mol_type = genomic DNA

SEQ ID NO: 3174 - protein, 98 aa, Arabidopsis thaliana; identical to SEQ ID NO: 3168

SEQ ID NO: 3175 - DNA, 141 bp, Arabidopsis thaliana
  source 1..141: mol_type = genomic DNA
tgaaatattcaaaccaatggtgagcaattggtagcacttgctaaagaagatggagaagacacagatgcctgtagcccgagaagagaagatactggttctcgtgagattgaggcctctaaaccagaaagagattgccgctaa

SEQ ID NO: 3176 - protein, 45 aa, Arabidopsis thaliana
NIQTNGEQLVALAKEDGEDTDACSPRREDTGSREIEASKPERDCR

SEQ ID NO: 3177 - DNA, 150 bp, Arabidopsis thaliana
  source 1..150: mol_type = genomic DNA
tgagttctggctaaagattttgtcttgaaggtgagattcattgttccgaatagagtgagaaaaagacttataagattgaaaaagcaagatgcggattttgtgcgatgcttgcgagaacgcagccgcaatcatcttttgcgccgccgatga

SEQ ID NO: 3178 - protein, 48 aa, Arabidopsis thaliana
VLAKDFVLKVRFIVPNRVRKRLIRLKKQDADFVRCLRERSRNHLLRRR

SEQ ID NO: 3179 - DNA, 177 bp, Arabidopsis thaliana
  source 1..177: mol_type = genomic DNA
tgaggaattcgatcttcgcttaaagaagacgaaacaatctctctctctttctctcttcaatggtctcaccatctctgtctaccatctcctagccaaagaagaagacgagaagaagaagagagggtcacaacaatgctttattcttcttatgtctccagccatgtgagctcccactga

SEQ ID NO: 3180 - protein, 57 aa, Arabidopsis thaliana
GIRSSLKEDETISLSFSLQWSHHLCLPSPSQRRRREEEERVTTMLYSSYVSSHVSSH

SEQ ID NO: 3181 - DNA, 162 bp, Arabidopsis thaliana
  source 1..162: mol_type = genomic DNA
tgactccctaatttcacacgatcaaagatctcgccaccgaaacgctttcacccaaggattctttcaacggcggcgaaggatatgattacacgacggagaaggacgatggccaagagagggatagtgaaattgacgaccagttggcagattctttggctttaa

SEQ ID NO: 3182 - protein, 52 aa, Arabidopsis thaliana
LPNFTRSKISPPKRFHPRILSTAAKDMITRRRRTMAKRGIVKLTTSWQILWL

SEQ ID NO: 3183 - DNA, 213 bp, Arabidopsis thaliana
  source 1..213: mol_type = genomic DNA
taatttcacacgatcaaagatctcgccaccgaaacgctttcacccaaggattctttcaacggcggcgaaggatatgattacacgacggagaaggacgatggccaagagagggatagtgaaattgacgaccagttggcagattctttggctttaaaactacaattcgactgcggaggaagcagacgaatttgtgtttcatcgatcgatccataa

SEQ ID NO: 3184 - protein, 69 aa, Arabidopsis thaliana
FHTIKDLATETLSPKDSFNGGEGYDYTTEKDDGQERDSEIDDQLADSLALKLQFDCGGSRRICVSSIDP

SEQ ID NO: 3185 - DNA, 63 bp, Arabidopsis thaliana
  source 1..63: mol_type = genomic DNA
taaagggaaaaacatattattctctctttaaattctcagcttcttttcatgaatctaaactaa

SEQ ID NO: 3186 - protein, 19 aa, Arabidopsis thaliana
REKHIILSLNSQLLFMNLN

SEQ ID NO: 3187 - DNA, 72 bp, Arabidopsis thaliana
  source 1..72: mol_type = genomic DNA
taggacaaaaaaaaacatggaagagttagagagagagagaggcagcagaaaatgattggtaaacaacaatga

SEQ ID NO: 3188 - protein, 22 aa, Arabidopsis thaliana
DKKKHGRVRERERQQKMIGKQQ

SEQ ID NO: 3189 - DNA, 60 bp, Arabidopsis thaliana
  source 1..60: mol_type = genomic DNA
taaaatcactcaaaggatttccacagtttttctttccatgttgatttagcccattcgtag

SEQ ID NO: 3190 - protein, 18 aa, Arabidopsis thaliana
NHSKDFHSFSFHVDLAHS

SEQ ID NO: 3191 - DNA, 57 bp, Arabidopsis thaliana
  source 1..57: mol_type = genomic DNA
taaataaataaaatcactcaaaggatttccacagtttttctttccatgttgatttag

SEQ ID NO: 3192 - protein, 17 aa, Arabidopsis thaliana
INKITQRISTVFLSMLI

SEQ ID NO: 3193 - DNA, 57 bp, Arabidopsis thaliana; identical to SEQ ID NO: 3191
  source 1..57: mol_type = genomic DNA

SEQ ID NO: 3194 - protein, 17 aa, Arabidopsis thaliana
INKITQRISTVFLSMLI

SEQ ID NO: 3195 - DNA, 60 bp, Arabidopsis thaliana; identical to SEQ ID NO: 3189
  source 1..60: mol_type = genomic DNA

SEQ ID NO: 3196 - protein, 18 aa, Arabidopsis thaliana
NHSKDFHSFSFHVDLAHS

SEQ ID NO: 3197 - DNA, 60 bp, Arabidopsis thaliana; identical to SEQ ID NO: 3189
  source 1..60: mol_type = genomic DNA

SEQ ID NO: 3198 - protein, 18 aa, Arabidopsis thaliana
NHSKDFHSFSFHVDLAHS

SEQ ID NO: 3199 - DNA, 57 bp, Arabidopsis thaliana; identical to SEQ ID NO: 3191
  source 1..57: mol_type = genomic DNA

SEQ ID NO: 3200 - protein, 17 aa, Arabidopsis thaliana
INKITQRISTVFLSMLI

SEQ ID NO: 3201 - DNA, 126 bp, Arabidopsis thaliana
  source 1..126: mol_type = genomic DNA
tgatttctccatctcacgtcgtcaaatgtttcatcatcatcttcatcatctttcgtacgacttctttttttttttttttggtttttttttcccttcccaatcgaagtagcgatgccttcgcgatag

SEQ ID NO: 3202 - protein, 40 aa, Arabidopsis thaliana
FLHLTSSNVSSSSSSSFVRLLFFFFWFFFPFPIEVAMPSR

SEQ ID NO: 3203 - DNA, 126 bp, Arabidopsis thaliana; identical to SEQ ID NO: 3201
  source 1..126: mol_type = genomic DNA

SEQ ID NO: 3204 - protein, 40 aa, Arabidopsis thaliana; identical to SEQ ID NO: 3202

SEQ ID NO: 3205 - DNA, 93 bp, Arabidopsis thaliana
  source 1..93: mol_type = genomic DNA
tagaattcgcctcctctttccaaaattcccaatttttgtaatgacgggatagaaaaattcccaatgtccgctttatctttcattctcgattag

SEQ ID NO: 3206 - protein, 29 aa, Arabidopsis thaliana
NSPPLSKIPNFCNDGIEKFPMSALSFILD

SEQ ID NO: 3207 - DNA, 93 bp, Arabidopsis thaliana; identical to SEQ ID NO: 3205
  source 1..93: mol_type = genomic DNA

SEQ ID NO: 3208 - protein, 29 aa, Arabidopsis thaliana
NSPPLSKIPNFCNDGIEKFPMSALSFILD

SEQ ID NO: 3209 - DNA, 54 bp, Arabidopsis thaliana
  source 1..54: mol_type = genomic DNA
taggtctttccattactttttaatgttttttctgttactgtctccgcgatctga

SEQ ID NO: 3210 - protein, 16 aa, Arabidopsis thaliana
VFPLLFNVFSVTVSAI

SEQ ID NO: 3211 - DNA, 75 bp, Arabidopsis thaliana
  source 1..75: mol_type = genomic DNA
tgaagattgagtctagtcgatttattggatgatccattcttcatcgtttttttcttgcttcgaagttctgtataa

SEQ ID NO: 3212 - protein, 23 aa, Arabidopsis thaliana
RLSLVDLLDDPFFIVFFLLRSSV

SEQ ID NO: 3213 - DNA, 63 bp, Arabidopsis thaliana
  source 1..63: mol_type = genomic DNA
tgaagactgacaatattatctttttcgaattcggagctcaagtttgaaattcggagaagctag

SEQ ID NO: 3214 - protein, 19 aa, Arabidopsis thaliana
RLTILSFSNSELKFEIRRS

SEQ ID NO: 3215 - DNA, 93 bp, Arabidopsis thaliana
  source 1..93: mol_type = genomic DNA
tgacaatattatctttttcgaattcggagctcaagtttgaaattcggagaagctagagagttttctgaggtacgattcttcgatcctctttga

SEQ ID NO: 3216 - protein, 29 aa, Arabidopsis thaliana
QYYLFRIRSSSLKFGEAREFSEVRFFDPL

SEQ ID NO: 3217 - DNA, 123 bp, Arabidopsis thaliana
  source 1..123: mol_type = genomic DNA
taagagagattgtttttgtctgctcgtcctgagatcacgctgagttatataaagaaaagaagaagaacaaaaccaagtttcaacaatggagattcttcgttgattcctaaatatctcctctga

SEQ ID NO: 3218 - protein, 39 aa, Arabidopsis thaliana
ERLFLSARPEITLSYIKKRRRTKPSFNNGDSSLIPKYLL

SEQ ID NO: 3219 - DNA, 150 bp, Arabidopsis thaliana
  source 1..150: mol_type = genomic DNA
taaatatctcctctgatcatattttttcattcaaaaagaatcctctgttttccccggcggtcacatgtcagtcggcgttccagtgaatccgtcaagcagcagccaactaccggcggcgccaacaacaacaacaagacggcgcgtggctga

SEQ ID NO: 3220 - protein, 48 aa, Arabidopsis thaliana
ISPLIIFFHSKRILCFPRRSHVSRRSSESVKQQPTTGGANNNNKTARG

SEQ ID NO: 3221 - DNA, 84 bp, Arabidopsis thaliana
  source 1..84: mol_type = genomic DNA
tgaggagttgaggctggtttcgccgacgatagacaacgatgggaagttgccgagaaagtatacgatggcaggtcaaggtgttaa

SEQ ID NO: 3222 - protein, 26 aa, Arabidopsis thaliana
GVEAGFADDRQRWEVAEKVYDGRSRC

SEQ ID NO: 3223 - DNA, 63 bp, Arabidopsis thaliana
  source 1..63: mol_type = genomic DNA
taatggaccgacgtaaccctttccaacatcaccaccaccaccatcagcttcatcatcacttga

SEQ ID NO: 3224 - protein, 19 aa, Arabidopsis thaliana
WTDVTLSNITTTTISFIIT

SEQ ID NO: 3225 - DNA, 132 bp, Arabidopsis thaliana
  source 1..132: mol_type = genomic DNA
taaatcctctctttctctctctctctcctccttcttcttcttcttcctgtcgctgccttgtggttgagtgagcaaaaaaactcaaaaccctccatggaaatgggagagagaatcaattcgagttgttgttag

SEQ ID NO: 3226 - protein, 42 aa, Arabidopsis thaliana
ILSFSLSLLLLLLLPVAALWLSEQKNSKPSMEMGERINSSCC

SEQ ID NO: 3227 - DNA, 87 bp, Arabidopsis thaliana
  source 1..87: mol_type = genomic DNA
tgagtgagcaaaaaaactcaaaaccctccatggaaatgggagagagaatcaattcgagttgttgttagggggtttgcgatattttag

SEQ ID NO: 3228 - protein, 27 aa, Arabidopsis thaliana
VSKKTQNPPWKWERESIRVVVRGFAIF

SEQ ID NO: 3229 - DNA, 132 bp, Arabidopsis thaliana; identical to SEQ ID NO: 3225
  source 1..132: mol_type = genomic DNA

SEQ ID NO: 3230 - protein, 42 aa, Arabidopsis thaliana; identical to SEQ ID NO: 3226

SEQ ID NO: 3231 - DNA, 87 bp, Arabidopsis thaliana; identical to SEQ ID NO: 3227
  source 1..87: mol_type = genomic DNA

SEQ ID NO: 3232 - protein, 27 aa, Arabidopsis thaliana
VSKKTQNPPWKWERESIRVVVRGFAIF

SEQ ID NO: 3233 - DNA, 63 bp, Arabidopsis thaliana
  source 1..63: mol_type = genomic DNA
taatcacacctctgctcgtttctcttctcgttagtctctgctccatctcctcctcagatttag

SEQ ID NO: 3234 - protein, 19 aa, Arabidopsis thaliana
SHLCSFLFSLVSAPSPPQI

SEQ ID NO: 3235 - DNA, 240 bp, Arabidopsis thaliana
  source 1..240: mol_type = genomic DNA
taatcaagaagagtgtgcaaaaattggaaggccagggaatgcagaaacatgtatttgaaagctgaactcaattgctctacaccaccctctcagatcctttgtccctttgggcccttgttctccctcatcccttatgtggacacccattttctaaacccctgcttccacaccttccagccttcctctcacaatgctagaaaaaacgccacttggaagcatgatctttgcgaagacggttga

SEQ ID NO: 3236 - protein, 78 aa, Arabidopsis thaliana
SRRVCKNWKARECRNMYLKAELNCSTPPSQILCPFGPLFSLIPYVDTHFLNPCFHTFQPSSHNARKNATWKHDLCEDG

SEQ ID NO: 3237 - DNA, 114 bp, Arabidopsis thaliana
  source 1..114: mol_type = genomic DNA
taaacccctgcttccacaccttccagccttcctctcacaatgctagaaaaaacgccacttggaagcatgatctttgcgaagacggttgatccgacactaacagcctcctcctga

SEQ ID NO: 3238 - protein, 36 aa, Arabidopsis thaliana
TPASTPSSLPLTMLEKTPLGSMIFAKTVDPTLTASS

SEQ ID NO: 3239 - DNA, 240 bp, Arabidopsis thaliana; identical to SEQ ID NO: 3235
  source 1..240: mol_type = genomic DNA

SEQ ID NO: 3240 - protein, 78 aa, Arabidopsis thaliana; identical to SEQ ID NO: 3236

SEQ ID NO: 3241 - DNA, 114 bp, Arabidopsis thaliana; identical to SEQ ID NO: 3237
  source 1..114: mol_type = genomic DNA

SEQ ID NO: 3242 - protein, 36 aa, Arabidopsis thaliana; identical to SEQ ID NO: 3238

SEQ ID NO: 3243 - DNA, 240 bp, Arabidopsis thaliana; identical to SEQ ID NO: 3235
  source 1..240: mol_type = genomic DNA

SEQ ID NO: 3244 - protein, 78 aa, Arabidopsis thaliana; identical to SEQ ID NO: 3236

SEQ ID NO: 3245 - DNA, 114 bp, Arabidopsis thaliana; identical to SEQ ID NO: 3237
  source 1..114: mol_type = genomic DNA

SEQ ID NO: 3246 - protein, 36 aa, Arabidopsis thaliana; identical to SEQ ID NO: 3238

SEQ ID NO: 3247 - DNA, 54 bp, Arabidopsis thaliana
  source 1..54: mol_type = genomic DNA
taaataactttaaccaaaggaaaatttgaaacgccagctcctctctccgtgtaa

SEQ ID NO: 3248 - protein, 16 aa, Arabidopsis thaliana
ITLTKGKFETPAPLSV

SEQ ID NO: 3249 - DNA, 153 bp, Arabidopsis thaliana
  source 1..153: mol_type = genomic DNA
tagctcaaaaaagttgtcatttttaatgttggttttctggtggcgatgctcttaattacccaattccgtacgatttatgatcataagtcaacttttgagatttgggtttgtgaaattttcctgaataaaattatgggtttagggtttttatga

SEQ ID NO: 3250 - protein, 49 aa, Arabidopsis thaliana
LKKVVIFNVGFLVAMLLITQFRTIYDHKSTFEIWVCEIFLNKIMGLGFL

SEQ ID NO: 3251 - DNA, 141 bp, Arabidopsis thaliana
  source 1..141: mol_type = genomic DNA
tgatactttgaatgtaaaaaagggaagatttttagtttcgatatgtatatctctcggatgggtttgagtcggagtttcccgccgctttttgggggatttcgggaaattctagggttagggttggatattgtcttcctctag

SEQ ID NO: 3252 - protein, 45 aa, Arabidopsis thaliana
YFECKKGKIFSFDMYISRMGLSRSFPPLFGGFREILGLGLDIVFL

SEQ ID NO: 3253 - DNA, 264 bp, Arabidopsis thaliana
  source 1..264: mol_type = genomic DNA
taaccatgtcggagagaccaagccgtcaccagagaagaccttctcagagcgtttttccgatctcccttgacgatctctccgatatctctctcgcagcaaatcctccttccaccgttcctactaacccgccacgtcaccagatccctccgccgtctcctgcagctcctccggctaaccgtagcaacaatgacgacaatgttagcaaagatcaccatgggaacgcctcttctaattaatatcgcttttttttgtctttggttttaa

SEQ ID NO: 3254 - protein, 86 aa, Arabidopsis thaliana
PCRRDQAVTREDLLRAFFRSPLTISPISLSQQILLPPFLLTRHVTRSLRRLLQLLRLTVATMTTMLAKITMGTPLLINIAFFCLWF

SEQ ID NO: 3255 - DNA, 123 bp, Arabidopsis thaliana
  source 1..123: mol_type = genomic DNA
taatgggcaggagatcctgcaaatgatgcattaccgtatccatttttaagccaactcttacaaaatggtaaaaagaaatcagttgcgtatgaagaagaacagtgctatctatctagattctag

SEQ ID NO: 3256 - protein, 39 aa, Arabidopsis thaliana
WAGDPANDALPYPFLSQLLQNGKKKSVAYEEEQCYLSRF

SEQ ID NO: 3257 - DNA, 174 bp, Arabidopsis thaliana
  source 1..174: mol_type = genomic DNA
taaaggggagacccgagaaagagcgagaccagttttgactttttggacattgtgtgttttcgattcgatcttttttttctgaagttaacaatgctggtactatcaataagaacaccaagatttgggaagtctctgctgaagattttgacaatgtcatcatggttaaaggagtag

SEQ ID NO: 3258 - protein, 56 aa, Arabidopsis thaliana
RGDPRKSETSFDFLDIVCFRFDLFFLKLTMLVLSIRTPRFGKSLLKILTMSSWLKE

SEQ ID NO: 3259 - DNA, 93 bp, Arabidopsis thaliana
  source 1..93: mol_type = genomic DNA
tagttctcctcgtgggtggaaaccatacctcctccaggttttgtactcgctagattcttcgattttctctttgcgattcttctttgttcttaa

SEQ ID NO: 3260 - protein, 29 aa, Arabidopsis thaliana
FSSWVETIPPPGFVLARFFDFLFAILLCS

SEQ ID NO: 3261 - DNA, 54 bp, Arabidopsis thaliana
  source 1..54: mol_type = genomic DNA
tagattcttcgattttctctttgcgattcttctttgttcttaagatctgtttag

SEQ ID NO: 3262 - protein, 16 aa, Arabidopsis thaliana
ILRFSLCDSSLFLRSV

SEQ ID NO: 3263 - DNA, 96 bp, Arabidopsis thaliana
  source 1..96: mol_type = genomic DNA
tgactcttcaatctctcccaaagcctaaagcgatctctgcaaatctctcgcgactctctctttcaaggtatattttctgattctttttgtttttga

SEQ ID NO: 3264 - protein, 30 aa, Arabidopsis thaliana
LFNLSQSLKRSLQISRDSLFQGIFSDSFCF

SEQ ID NO: 3265 - DNA, 165 bp, Arabidopsis thaliana
  source 1..165: mol_type = genomic DNA
tagaaaagacggttttgggcttttggtttgcgatataaagaagaccttcgtgtggaagataataattcatcctttcgtctttttctgactcttcaatctctcccaaagcctaaagcgatctctgcaaatctctcgcgactctctctttcaaggtatattttctga

SEQ ID NO: 3266 - protein, 53 aa, Arabidopsis thaliana
KRRFWAFGLRYKEDLRVEDNNSSFRLFLTLQSLPKPKAISANLSRLSLSRYIF

SEQ ID NO: 3267 - DNA, 186 bp, Arabidopsis thaliana
  source 1..186: mol_type = genomic DNA
tgaagatccgtttctctctctctcactgagactattgttgttaggtcaacttgcgatcatggcgatttcgaaggtctgaagctgatttcgaatggtttggagatatccgtagtggttaagcatatggaagtctatgttctgctcttggttgctctgttagggcttcctccatttggaccaacttag

SEQ ID NO: 3268 - protein, 60 aa, Arabidopsis thaliana
RSVSLSLTETIVVRSTCDHGDFEGLKLISNGLEISVVVKHMEVYVLLLVALLGLPPFGPT

SEQ ID NO: 3269 - DNA, 54 bp, Arabidopsis thaliana
  source 1..54: mol_type = genomic DNA
tgaattatgtttatttccaacctaaattctcaatctttcttcccaaaactctaa

SEQ ID NO: 3270 - protein, 16 aa, Arabidopsis thaliana
IMFISNLNSQSFFPKL

SEQ ID NO: 3271 - DNA, 57 bp, Arabidopsis thaliana
  source 1..57: mol_type = genomic DNA
tagaaatacgttttaagcttcacgaggaataagaagattaggaatatatgggcttaa

SEQ ID NO: 3272 - protein, 17 aa, Arabidopsis thaliana
KYVLSFTRNKKIRNIWA

SEQ ID NO: 3273 - DNA, 63 bp, Arabidopsis thaliana
  source 1..63: mol_type = genomic DNA
tgaagttattttgtctcaattcgatctcctccgtcaggtttgttttacaaatcttgcttctga

SEQ ID NO: 3274 - protein, 19 aa, Arabidopsis thaliana
SYFVSIRSPPSGLFYKSCF

SEQ ID NO: 3275 - DNA, 54 bp, Arabidopsis thaliana
  source 1..54: mol_type = genomic DNA
taattttcttctcagagaaagagaattaatagagagagagatcatgggagatga

SEQ ID NO: 3276 - protein, 16 aa, Arabidopsis thaliana
FSSQRKRINRERDHGR

SEQ ID NO: 3277 - DNA, 57 bp, Arabidopsis thaliana
  source 1..57: mol_type = genomic DNA
taaatcatctgtttcgttgcagagagctctaaaagaaacaacaacctttctctctga

SEQ ID NO: 3278 - protein, 17 aa, Arabidopsis thaliana
IICFVAESSKRNNNLSL

SEQ ID NO: 3279 - DNA, 60 bp, Arabidopsis thaliana
  source 1..60: mol_type = genomic DNA
tagttgagactagtatcagtgttcttcttgatcttttaccagacattccattatggatga

SEQ ID NO: 3280 - protein, 18 aa, Arabidopsis thaliana
LRLVSVFFLIFYQTFHYG

SEQ ID NO: 3281 - DNA, 66 bp, Arabidopsis thaliana
  source 1..66: mol_type = genomic DNA
tgagaatctagggtttgggagatgagcagtcgattccgttggatccccagcaccacatctgtatga

SEQ ID NO: 3282 - protein, 20 aa, Arabidopsis thaliana
ESRVWEMSSRFRWIPSTTSV

SEQ ID NO: 3283 - DNA, 69 bp, Arabidopsis thaliana
  source 1..69: mol_type = genomic DNA
tgagcagtcgattccgttggatccccagcaccacatctgtatgaaattaaaggctgtgagtctatctga

SEQ ID NO: 3284 - protein, 21 aa, Arabidopsis thaliana
AVDSVGSPAPHLYEIKGCESI

SEQ ID NO: 3285 - DNA, 66 bp, Arabidopsis thaliana; identical to SEQ ID NO: 3281
  source 1..66: mol_type = genomic DNA

SEQ ID NO: 3286 - protein, 20 aa, Arabidopsis thaliana
ESRVWEMSSRFRWIPSTTSV

SEQ ID NO: 3287 - DNA, 69 bp, Arabidopsis thaliana; identical to SEQ ID NO: 3283
  source 1..69: mol_type = genomic DNA

SEQ ID NO: 3288 - protein, 21 aa, Arabidopsis thaliana
AVDSVGSPAPHLYEIKGCESI

SEQ ID NO: 3289 - DNA, 96 bp, Arabidopsis thaliana
  source 1..96: mol_type = genomic DNA
tgaatctctttctctctttctcatggtgaagttttgtggcacctgaaactgagagagaagcttcttcttcttcttcgtattgaaacaaaccagtga

SEQ ID NO: 3290 - protein, 30 aa, Arabidopsis thaliana
ISFSLSHGEVLWHLKLREKLLLLLRIETNQ

SEQ ID NO: 3291 - DNA, 57 bp, Arabidopsis thaliana
  source 1..57: mol_type = genomic DNA
tgaagttttgtggcacctgaaactgagagagaagcttcttcttcttcttcgtattga

SEQ ID NO: 3292 - protein, 17 aa, Arabidopsis thaliana
SFVAPETEREASSSSSY

SEQ ID NO: 3293 - DNA, 81 bp, Arabidopsis thaliana
  source 1..81: mol_type = genomic DNA
tagattctgtattgtaagctactaaaatctgcgatggtgaggcatttcaatcgtcgccggaaaattcatcggagatattaa

SEQ ID NO: 3294 - protein, 25 aa, Arabidopsis thaliana
ILYCKLLKSAMVRHFNRRRKIHRRY

SEQ ID NO: 3295 - DNA, 78 bp, Arabidopsis thaliana
  source 1..78: mol_type = genomic DNA
taagctttttgctttgttattgtaatctctgaatctggaatgatggttgtttctctgtgcatgcaattggccttttga

SEQ ID NO: 3296 - protein, 24 aa, Arabidopsis thaliana
AFCFVIVISESGMMVVSLCMQLAF

SEQ ID NO: 3297 - DNA, 66 bp, Arabidopsis thaliana
  source 1..66: mol_type = genomic DNA
tgaatctggaatgatggttgtttctctgtgcatgcaattggccttttgaggatctctgattcgtag

SEQ ID NO: 3298 - protein, 20 aa, Arabidopsis thaliana
IWNDGCFSVHAIGLLRISDS

SEQ ID NO: 3299 - DNA, 78 bp, Arabidopsis thaliana; identical to SEQ ID NO: 3295
  source 1..78: mol_type = genomic DNA

SEQ ID NO: 3300 - protein, 24 aa, Arabidopsis thaliana
AFCFVIVISESGMMVVSLCMQLAF

SEQ ID NO: 3301 - DNA, 66 bp, Arabidopsis thaliana; identical to SEQ ID NO: 3297
  source 1..66: mol_type = genomic DNA

SEQ ID NO: 3302 - protein, 20 aa, Arabidopsis thaliana
IWNDGCFSVHAIGLLRISDS

SEQ ID NO: 3303 - DNA, 69 bp, Arabidopsis thaliana
  source 1..69: mol_type = genomic DNA
taatctcctctgtggagagcaatgactaaaactcgtgggactgatgtaagttttgatttccactgttaa

SEQ ID NO: 3304 - protein, 21 aa, Arabidopsis thaliana
SPLWRAMTKTRGTDVSFDFHC

SEQ ID NO: 3305 - DNA, 75 bp, Arabidopsis thaliana
  source 1..75: mol_type = genomic DNA
tgattcgccatcgtcgctaccgattgtcttgaggtttacgacttttggactaatctcctctgtggagagcaatga

SEQ ID NO: 3306 - protein, 23 aa, Arabidopsis thaliana
FAIVATDCLEVYDFWTNLLCGEQ

SEQ ID NO: 3307 - DNA, 144 bp, Arabidopsis thaliana
  source 1..144: mol_type = genomic DNA
tgaaattcagccttagttcgtctctttcgttctgggtttctctgtaattgtagcccaattccaatcctgggcatgtatttcaaagtgtttccatcttcttttgtcaaagttgaagactttgctcgttttgaatccgtccgctag

SEQ ID NO: 3308 - protein, 46 aa, Arabidopsis thaliana
NSALVRLFRSGFLCNCSPIPILGMYFKVFPSSFVKVEDFARFESVR

SEQ ID NO: 3309 - DNA, 156 bp, Arabidopsis thaliana
  source 1..156: mol_type = genomic DNA
taatgggttcagttgatgaggttgagatatctaagactagggtttcatgtcctcctgctctctcaacatctcataagattctcatcagtgaagagaaacctaggagatggtccgagagttcgttgcctgatgtctctaataggattaagcttttga

SEQ ID NO: 3310 - protein, 50 aa, Arabidopsis thaliana
WVQLMRLRYLRLGFHVLLLSQHLIRFSSVKRNLGDGPRVRCLMSLIGLSF

SEQ ID NO: 3311 - DNA, 60 bp, Arabidopsis thaliana
  source 1..60: mol_type = genomic DNA
tagacggaaatggagattcgacttttccgaaatactgcctattcgatgatcccttggtga

SEQ ID NO: 3312 - protein, 18 aa, Arabidopsis thaliana
TEMEIRLFRNTAYSMIPW

SEQ ID NO: 3313 - DNA, 72 bp, Arabidopsis thaliana
  source 1..72: mol_type = genomic DNA
taaaaggaagagaaagagctaagcttctctccctccttccatttccactcgatgttcagctgcccaagctaa

SEQ ID NO: 3314 - protein, 22 aa, Arabidopsis thaliana
KEEKELSFSPSFHFHSMFSCPS

SEQ ID NO: 3315 - DNA, 87 bp, Arabidopsis thaliana
  source 1..87: mol_type = genomic DNA
tagccccagtcttctcttccatggctcatctcgctctctcctctcctgttcagacggcagcaacaaccgtcctcctccctccggtga

SEQ ID NO: 3316 - protein, 27 aa, Arabidopsis thaliana
PQSSLPWLISLSPLLFRRQQQPSSSLR

SEQ ID NO: 3317 - DNA, 120 bp, Arabidopsis thaliana
  source 1..120: mol_type = genomic DNA
tgaaacctagccccagtcttctcttccatggctcatctcgctctctcctctcctgttcagacggcagcaacaaccgtcctcctccctccggtgacaccgtcccaaagcaagttcctctga

SEQ ID NO: 3318 - protein, 38 aa, Arabidopsis thaliana
NLAPVFSSMAHLALSSPVQTAATTVLLPPVTPSQSKFL

SEQ ID NO: 3319 - DNA, 171 bp, Arabidopsis thaliana
  source 1..171: mol_type = genomic DNA
taaaaggaggcaaacacgaagagctcacaacaagattcaagattcaagattcatgctttcagatttcaactagatgttgaaaagtcatggaaagtgcagaaaattactgcccagaattgttgcttcaccctatttgctgattcggttcggtttgcattggttttgaaataa

SEQ ID NO: 3320 - protein, 55 aa, Arabidopsis thaliana
KEANTKSSQQDSRFKIHAFRFQLDVEKSWKVQKITAQNCCFTLFADSVRFALVLK

SEQ ID NO: 3321 - DNA, 96 bp, Arabidopsis thaliana
  source 1..96: mol_type = genomic DNA
tagatgttgaaaagtcatggaaagtgcagaaaattactgcccagaattgttgcttcaccctatttgctgattcggttcggtttgcattggttttga

SEQ ID NO: 3322 - protein, 30 aa, Arabidopsis thaliana
MLKSHGKCRKLLPRIVASPYLLIRFGLHWF

SEQ ID NO: 3323 - DNA, 63 bp, Arabidopsis thaliana
  source 1..63: mol_type = genomic DNA
tgaaaagtcatggaaagtgcagaaaattactgcccagaattgttgcttcaccctatttgctga

SEQ ID NO: 3324 - protein, 19 aa, Arabidopsis thaliana
KVMESAENYCPELLLHPIC

SEQ ID NO: 3325 - DNA, 63 bp, Arabidopsis thaliana
  source 1..63: mol_type = genomic DNA
taaattggtttagtgttacaagaccaaaaccagatatttatcttatcgtaccagaccgagtaa

SEQ ID NO: 3326 - protein, 19 aa, Arabidopsis thaliana
IGLVLQDQNQIFILSYQTE

SEQ ID NO: 3327 - DNA, 117 bp, Arabidopsis thaliana
  source 1..117: mol_type = genomic DNA
taaagagttaattctcgtggtcgtggagagcaaatgagggatgttctcctggttagcgagaatggctcttttttgtttacgacctatgcggcgatacggtcgtatgaacagagatga

SEQ ID NO: 3328 - protein, 37 aa, Arabidopsis thaliana
RVNSRGRGEQMRDVLLVSENGSFLFTTYAAIRSYEQR

SEQ ID NO: 3329 - DNA, 300 bp, Arabidopsis thaliana
  source 1..300: mol_type = genomic DNA
taatatacaagaattaaaagaaggtatatcatcatctctctagctagtgatcaaagcaccgtcatcatcatcatatatcatcagcttgcctcagaggagaagaccaacataagagagatcgaagatcaaaatctatctctcttcatcatcttctgctgttactatcatatcacacgctctctcaaacatcatcctatatatagacttctcttcatcatcatcaaatgcaaggtcatcaccagaatcatcatcaacacttatcatcatcctccgccacgtcttcccatggaaacttcatga

SEQ ID NO: 3330 - protein, 98 aa, Arabidopsis thaliana
YTRIKRRYIIISLASDQSTVIIIIYHQLASEEKTNIREIEDQNLSLFIIFCCYYHITRSLKHHPIYRLLFIIIKCKVITRIIINTYHHPPPRLPMETS

SEQ ID NO: 3331 - DNA, 183 bp, Arabidopsis thaliana
  source 1..183: mol_type = genomic DNA
tgaagaatcgtacacctttcttatcgtcttctccatcgtttctccctgaagatttgttctactactctttttgggtatatctgtttacttgaatctcttaccatgaaagttcttcaattatttccttacttaaatctaagttgctttatgttgcgtttgattaatgggatcgtacttttctaa

SEQ ID NO: 3332 - protein, 59 aa, Arabidopsis thaliana
RIVHLSYRLLHRFSLKICSTTLFGYICLLESLTMKVLQLFPYLNLSCFMLRLINGIVLF

SEQ ID NO: 3333 - DNA, 75 bp, Arabidopsis thaliana
  source 1..75: mol_type = genomic DNA
tgaatctcttaccatgaaagttcttcaattatttccttacttaaatctaagttgctttatgttgcgtttgattaa

SEQ ID NO: 3334 - protein, 23 aa, Arabidopsis thaliana
ISYHESSSIISLLKSKLLYVAFD

SEQ ID NO: 3335 - DNA, 69 bp, Arabidopsis thaliana
  source 1..69: mol_type = genomic DNA
tgaaccagaaaagttttgattttgattttggtgaaccaggaaagtggtactcgatctgtggtttgttga

SEQ ID NO: 3336 - protein, 21 aa, Arabidopsis thaliana
TRKVLILILVNQESGTRSVVC

SEQ ID NO: 3337 - DNA, 93 bp, Arabidopsis thaliana
  source 1..93: mol_type = genomic DNA
tagttccctcagaaaattctccattctccattttcctgcaatccaatatctttatctccaaagataatggcccagcagatctcagatatatag

SEQ ID NO: 3338 - protein, 29 aa, Arabidopsis thaliana
FPQKILHSPFSCNPISLSPKIMAQQISDI

SEQ ID NO: 3339 - DNA, 138 bp, Arabidopsis thaliana
  source 1..138: mol_type = genomic DNA
tagaaaccattaagctcctacctctttctagttgatgctcgtgttctcttcactgtctatgactccagttgtgatccctcaaaatctccgtgtctttggccctggtttgaatccctctttcccttactgcattgctaa

SEQ ID NO: 3340 - protein, 44 aa, Arabidopsis thaliana
KPLSSYLFLVDARVLFTVYDSSCDPSKSPCLWPWFESLFPLLHC

SEQ ID NO: 3341 - DNA, 123 bp, Arabidopsis thaliana
  source 1..123: mol_type = genomic DNA
tagttgatgctcgtgttctcttcactgtctatgactccagttgtgatccctcaaaatctccgtgtctttggccctggtttgaatccctctttcccttactgcattgctaatcacttcccttga

SEQ ID NO: 3342 - protein, 39 aa, Arabidopsis thaliana
LMLVFSSLSMTPVVIPQNLRVFGPGLNPSFPYCIANHFP

SEQ ID NO: 3343 - DNA, 138 bp, Arabidopsis thaliana; identical to SEQ ID NO: 3339
  source 1..138: mol_type = genomic DNA

SEQ ID NO: 3344 - protein, 44 aa, Arabidopsis thaliana; identical to SEQ ID NO: 3340

SEQ ID NO: 3345 - DNA, 81 bp, Arabidopsis thaliana
  source 1..81: mol_type = genomic DNA
tgaagatcttttgcagattgggactacacgcagggagctaaggaaacaaaaggacttgctgagagaatcacagccccatag

SEQ ID NO: 3346 - protein, 25 aa, Arabidopsis thaliana
RSFADWDYTQGAKETKGLAERITAP

SEQ ID NO: 3347 - DNA, 72 bp, Arabidopsis thaliana
  source 1..72: mol_type = genomic DNA
taaactggtttgatggatgatgatgatatggagtttgaggaagaatttttgatgatctgtgtgtggacctga

SEQ ID NO: 3348 - protein, 22 aa, Arabidopsis thaliana
TGLMDDDDMEFEEEFLMICVWT

SEQ ID NO: 3349 - DNA, 171 bp, Arabidopsis thaliana
  source 1..171: mol_type = genomic DNA
tgagagcgccctccgtcactgcctcgatcttggcatctccgccctcaaatccggcaagcctcccttggacgtcgccgaacttgtcgtacgcctctctttctcgataattgtttttttttctttggcatatggcagctggtcggatccatgcgttttgataattttgtctag

SEQ ID NO: 3350 - protein, 55 aa, Arabidopsis thaliana
ERPPSLPRSWHLRPQIRQASLGRRRTCRTPLFLDNCFFFFGIWQLVGSMRFDNFV

SEQ ID NO: 3351 - DNA, 162 bp, Arabidopsis thaliana
  source 1..162: mol_type = genomic DNA
tagttaactgatttccttttgattgcatttacttcgacgcatgatagtagtcggcgtaatttcaacagtaccttgacacgccaaaagcttcacgtaatttgctgtcgaagaagatctatcgattccacgaatttggtgacttctgccgattctcccgtttga

SEQ ID NO: 3352 - protein, 52 aa, Arabidopsis thaliana
LTDFLLIAFTSTHDSSRRNFNSTLTRQKLHVICCRRRSIDSTNLVTSADSPV

SEQ ID NO: 3353 - DNA, 162 bp, Arabidopsis thaliana; identical to SEQ ID NO: 3351
  source 1..162: mol_type = genomic DNA

SEQ ID NO: 3354 - protein, 52 aa, Arabidopsis thaliana; identical to SEQ ID NO: 3352

SEQ ID NO: 3355 - DNA, 111 bp, Arabidopsis thaliana
  source 1..111: mol_type = genomic DNA
tgaccaaattcgaggatttttatcggtaaaaagatacagagaaagcataattcagcaacttcagagctcaattccgcttcttcaaccatcgaaaaccacaatatctcttga

SEQ ID NO: 3356 - protein, 35 aa, Arabidopsis thaliana
PNSRIFIGKKIQRKHNSATSELNSASSTIENHNIS

SEQ ID NO: 3357 - DNA, 90 bp, Arabidopsis thaliana
  source 1..90: mol_type = genomic DNA
taaaagatagagagagaggagggatgtagtaggccaataggcaaatcagagaatcacaaatggtatctggtcaagaagattcctgtttag

SEQ ID NO: 3358 - protein, 28 aa, Arabidopsis thaliana
KIEREEGCSRPIGKSENHKWYLVKKIPV

SEQ ID NO: 3359 - DNA, 129 bp, Arabidopsis thaliana
  source 1..129: mol_type = genomic DNA
tagcggtcttccttccctcctttgtttccgggctgttccttaatcactatctctttctctttcttctgccatcgccaaaccttatctgggttttgcttcttatttgaagatttatatgggctgaactag

SEQ ID NO: 3360 - protein, 41 aa, Arabidopsis thaliana
RSSFPPLFPGCSLITISFSFFCHRQTLSGFCFLFEDLYGLN

SEQ ID NO: 3361 - DNA, 84 bp, Arabidopsis thaliana
  source 1..84: mol_type = genomic DNA
taatcactatctctttctctttcttctgccatcgccaaaccttatctgggttttgcttcttatttgaagatttatatgggctga

SEQ ID NO: 3362 - protein, 26 aa, Arabidopsis thaliana
SLSLSLSSAIAKPYLGFASYLKIYMG

SEQ ID NO: 3363 - DNA, 66 bp, Arabidopsis thaliana
  source 1..66: mol_type = genomic DNA
tgaagatttatatgggctgaactaggaatttcatgggagttgtggaggatactgaacctcctttga

SEQ ID NO: 3364 - protein, 20 aa, Arabidopsis thaliana
RFIWAELGISWELWRILNLL

SEQ ID NO: 3365 - DNA, 69 bp, Arabidopsis thaliana
  source 1..69: mol_type = genomic DNA
taaagcttgcaacttttagtgacaacgaataatgggtttgctttgaagaagctaatcactgggttctaa

SEQ ID NO: 3366 - protein, 21 aa, Arabidopsis thaliana
SLQLLVTTNNGFALKKLITGF

SEQ ID NO: 3367 - DNA, 132 bp, Arabidopsis thaliana
  source 1..132: mol_type = genomic DNA
taattcttctctctttctctggatcacaacaaagcagtgaatgagaaaaacagcatgagttggttcacaaggtctgttgatgtgtaccgtaaagttgtgagcttgaatctgtattgccgagttattctgtaa

SEQ ID NO: 3368 - protein, 42 aa, Arabidopsis thaliana
FFSLSLDHNKAVNEKNSMSWFTRSVDVYRKVVSLNLYCRVIL

SEQ ID NO: 3369 - DNA, 171 bp, Arabidopsis thaliana
  source 1..171: mol_type = genomic DNA
taaagttgtgagcttgaatctgtattgccgagttattctgtaaactttttctctgccttgaaaaaccccatcttcaatcttcttctaaatcctcagccttttctaaactctttaataatgggatcccaacgtttctacgttttccactgtgaccagtataggatcatctaa

SEQ ID NO: 3370 - protein, 55 aa, Arabidopsis thaliana
SCELESVLPSYSVNFFSALKNPIFNLLLNPQPFLNSLIMGSQRFYVFHCDQYRII

SEQ ID NO: 3371 - DNA, 75 bp, Arabidopsis thaliana
  source 1..75: mol_type = genomic DNA
tgagagttattgcttgcttccaaccgatggataattgtcaggctgaatactttagacatatactcaaaccagtga

SEQ ID NO: 3372 - protein, 23 aa, Arabidopsis thaliana
ELLLASNRWIIVRLNTLDIYSNQ

SEQ ID NO: 3373 - DNA, 171 bp, Arabidopsis thaliana; identical to SEQ ID NO: 3369
  source 1..171: mol_type = genomic DNA

SEQ ID NO: 3374 - protein, 55 aa, Arabidopsis thaliana; identical to SEQ ID NO: 3370

SEQ ID NO: 3375 - DNA, 132 bp, Arabidopsis thaliana; identical to SEQ ID NO: 3367
  source 1..132: mol_type = genomic DNA

SEQ ID NO: 3376 - protein, 42 aa, Arabidopsis thaliana; identical to SEQ ID NO: 3368

SEQ ID NO: 3377 - DNA, 93 bp, Arabidopsis thaliana
  source 1..93: mol_type = genomic DNA
tgattcagtccatggctgccacggctcttttccgatcgattcgccgacgcgacgtcgtctccgcgcctctttccgtttacaaatcccttgtag

SEQ ID NO: 3378 - protein, 29 aa, Arabidopsis thaliana
FSPWLPRLFSDRFADATSSPRLFPFTNPL

SEQ ID NO: 3379 - DNA, 81 bp, Arabidopsis thaliana
  source 1..81: mol_type = genomic DNA
tgattcggcttggatcatctttgccaatcatcatctccctctatatatcatcatttaatggcttttggttcgtctctgtga

SEQ ID NO: 3380 - protein, 25 aa, Arabidopsis thaliana
FGLDHLCQSSSPSIYHHLMAFGSSL

SEQ ID NO: 3381 - DNA, 60 bp, Arabidopsis thaliana
  source 1..60: mol_type = genomic DNA
taatgcatgactgtttctatctttagactttgtttggtctatgaaatcattgttatgtag

SEQ ID NO: 3382 - protein, 18 aa, Arabidopsis thaliana
CMTVSIFRLCLVYEIIVM

SEQ ID NO: 3383 - DNA, 63 bp, Arabidopsis thaliana
  source 1..63: mol_type = genomic DNA
tgactgtttctatctttagactttgtttggtctatgaaatcattgttatgtagattatgctga

SEQ ID NO: 3384 - protein, 19 aa, Arabidopsis thaliana
LFLSLDFVWSMKSLLCRLC

SEQ ID NO: 3385 - DNA, 60 bp, Arabidopsis thaliana
  source 1..60: mol_type = genomic DNA
tagatctctccctctttcgtcgctctttgttttctccactggtctttgtttctcctttga

SEQ ID NO: 3386 - protein, 18 aa, Arabidopsis thaliana
ISPSFVALCFLHWSLFLL

SEQ ID NO: 3387 - DNA, 108 bp, Arabidopsis thaliana
  source 1..108: mol_type = genomic DNA
taaccctccaaaccaaattctaaagcctcaaatttggaatattccctttcttcttcattcccttttttttttttaatttgccatttactcattattgatcttatgtga

SEQ ID NO: 3388 - protein, 34 aa, Arabidopsis thaliana
PSKPNSKASNLEYSLSSSFPFFFLICHLLIIDLM

SEQ ID NO: 3389 - DNA, 57 bp, Arabidopsis thaliana
  source 1..57: mol_type = genomic DNA
taatctccgatgaatcaaattcatcaaaagattcatcttttagatctggttacgtaa

SEQ ID NO: 3390 - protein, 17 aa, Arabidopsis thaliana
SPMNQIHQKIHLLDLVT

SEQ ID NO: 3391 - DNA, 120 bp, Arabidopsis thaliana
  source 1..120: mol_type = genomic DNA
tgattcttcttctccttcttcgagatgacaagttcagagaacgagattttaccatcccttattctatcagaccggtttaagctgcagatttctaggcttagcgttcgatttcgtcgctga

SEQ ID NO: 3392 - protein, 38 aa, Arabidopsis thaliana
FFFSFFEMTSSENEILPSLILSDRFKLQISRLSVRFRR

SEQ ID NO: 3393 - DNA, 114 bp, Arabidopsis thaliana
  source 1..114: mol_type = genomic DNA
tgacaagttcagagaacgagattttaccatcccttattctatcagaccggtttaagctgcagatttctaggcttagcgttcgatttcgtcgctgaaagtgaaaagttcatctag

SEQ ID NO: 3394 - protein, 36 aa, Arabidopsis thaliana
QVQRTRFYHPLFYQTGLSCRFLGLAFDFVAESEKFI

SEQ ID NO: 3395 - DNA, 93 bp, Arabidopsis thaliana
  source 1..93: mol_type = genomic DNA
taaaattgtttttataagaaagtttatgatggctccgatgacgaactggttaacgttttctctgtcaccaatggagatgttgaggtcatctga

SEQ ID NO: 3396 - protein, 29 aa, Arabidopsis thaliana
NCFYKKVYDGSDDELVNVFSVTNGDVEVI

SEQ ID NO: 3397 - DNA, 90 bp, Arabidopsis thaliana
  source 1..90: mol_type = genomic DNA
taatttcaatttgtagggttcctcaaaatcatttcaataattcaatttcagatgtatggtgatgcttctttgattacaaatcggcgttga

SEQ ID NO: 3398 - protein, 28 aa, Arabidopsis thaliana
FQFVGFLKIISIIQFQMYGDASLITNRR

SEQ ID NO: 3399 - DNA, 84 bp, Arabidopsis thaliana
  source 1..84: mol_type = genomic DNA
tgattgattcaactagatactatcgatttcgttggatttgtactgaaaacttggctgattttgttgattctgtcttgctggtga

SEQ ID NO: 3400 - protein, 26 aa, Arabidopsis thaliana
LIQLDTIDFVGFVLKTWLILLILSCW

SEQ ID NO: 3401 - DNA, 57 bp, Arabidopsis thaliana
  source 1..57: mol_type = genomic DNA
tgatcggagatagtgtatgagctagttgtttgtaatttgacggctctcgggaactga

SEQ ID NO: 3402 - protein, 17 aa, Arabidopsis thaliana
SEIVYELVVCNLTALGN

SEQ ID NO: 3403 - DNA, 51 bp, Arabidopsis thaliana
  source 1..51: mol_type = genomic DNA
tgactctaccagctcttctggttgctgtttactttcattggcttagcatga

SEQ ID NO: 3404 - protein, 15 aa, Arabidopsis thaliana
LYQLFWLLFTFIGLA

SEQ ID NO: 3405 - DNA, 90 bp, Arabidopsis thaliana
  source 1..90: mol_type = genomic DNA
taaaaaattaagagttgtcattctttgaatccccgcaagcaagaagaagaagaagaagaagagagtcaatttgtgtgttttgtcatttga

SEQ ID NO: 3406 - protein, 28 aa, Arabidopsis thaliana
KIKSCHSLNPRKQEEEEEEESQFVCFVI

SEQ ID NO: 3407 - DNA, 54 bp, Arabidopsis thaliana
  source 1..54: mol_type = genomic DNA
tgattttttttcaaggtcaattttttcttctctttaaactctgcaaaatcgtga

SEQ ID NO: 3408 - protein, 16 aa, Arabidopsis thaliana
FFFKVNFFFSLNSAKS

SEQ ID NO: 3409 - DNA, 168 bp, Arabidopsis thaliana
  source 1..168: mol_type = genomic DNA
tgagttttggggtttatttcgagacatacccatacaaagtttgatacttttgtgtccccccttatcaagaaaattgtggggtttttttttttttttaataagcttcctttaaattttcaatttttattttggaggaaaagagtgagaatttcagataagaatctatga

SEQ ID NO: 3410 - protein, 54 aa, Arabidopsis thaliana
VLGFISRHTHTKFDTFVSPLIKKIVGFFFFFNKLPLNFQFLFWRKRVRISDKNL

SEQ ID NO: 3411 - DNA, 99 bp, Arabidopsis thaliana
  source 1..99: mol_type = genomic DNA
tgacttgttagttttcaccctaaaaatcccaatctcctggttggattctgggttttgacttcgacgttgctcaatctgacgccgcgttcgagctactga

SEQ ID NO: 3412 - protein, 31 aa, Arabidopsis thaliana
LVSFHPKNPNLLVGFWVLTSTLLNLTPRSSY

SEQ ID NO: 3413 - DNA, 84 bp, Arabidopsis thaliana
  source 1..84: mol_type = genomic DNA
taaaaatcccaatctcctggttggattctgggttttgacttcgacgttgctcaatctgacgccgcgttcgagctactgaagtag

SEQ ID NO: 3414 - protein, 26 aa, Arabidopsis thaliana
KSQSPGWILGFDFDVAQSDAAFELLK

SEQ ID NO: 3415 - DNA, 183 bp, Arabidopsis thaliana
  source 1..183: mol_type = genomic DNA
taatttgaccgttggagaacattactacttttcgcaaaagaagggaaaaaaaaagagagagataaagctctcttcgattcttttgcaatcttctctcctacggttgtttcaatctccgaccaaaccgtgctttcgaatagaacccagaaatggcatcgccacagagtaccaaaaccggtttga

SEQ ID NO: 3416 - protein, 59 aa, Arabidopsis thaliana
FDRWRTLLLFAKEGKKKERDKALFDSFAIFSPTVVSISDQTVLSNRTQKWHRHRVPKPV

SEQ ID NO: 3417 - DNA, 132 bp, Arabidopsis thaliana
  source 1..132: mol_type = genomic DNA
tagaaatcgaaactgggcttgatcaattttgactctttgcatccaatttcgattctaatctccgtaattgttctccgaatcgggtcaatttcaagttgggaaacaaaccctagcgaacctccattgatgtga

SEQ ID NO: 3418 - protein, 42 aa, Arabidopsis thaliana
KSKLGLINFDSLHPISILISVIVLRIGSISSWETNPSEPPLM

SEQ ID NO: 3419 - DNA, 63 bp, Arabidopsis thaliana
  source 1..63: mol_type = genomic DNA
taattgttctccgaatcgggtcaatttcaagttgggaaacaaaccctagcgaacctccattga

SEQ ID NO: 3420 - protein, 19 aa, Arabidopsis thaliana
LFSESGQFQVGKQTLANLH

SEQ ID NO: 3421 - DNA, 54 bp, Arabidopsis thaliana
  source 1..54: mol_type = genomic DNA
taatctcgtgcttccaattcaaataattttgtctccttagcggatcgatcgtag

SEQ ID NO: 3422 - protein, 16 aa, Arabidopsis thaliana
SRASNSNNFVSLADRS

SEQ ID NO: 3423 - DNA, 186 bp, Arabidopsis thaliana
  source 1..186: mol_type = genomic DNA
tagcttcgtcgtttttactatagtttagttctcttcttcttcttttttcgtcattacaatctctttcttaatttacttcttcttgatagtataattaagttgtttgtaataatctgtacaaagatgttgtgttctcataaaaaattcaattttgtaaagaagctctacatgttccttgctctgtaa

SEQ ID NO: 3424 - protein, 60 aa, Arabidopsis thaliana
LRRFYYSLVLFFFFFRHYNLFLNLLLLDSIIKLFVIICTKMLCSHKKFNFVKKLYMFLAL

SEQ ID NO: 3425 - DNA, 90 bp, Arabidopsis thaliana
  source 1..90: mol_type = genomic DNA
tagagaagctcttcaagtatccgatgtttttgtttaatcaacaagaggcggagatacgggagaaattgcatgtgtaatcataaaatgtag

SEQ ID NO: 3426 - protein, 28 aa, Arabidopsis thaliana
RSSSSIRCFCLINKRRRYGRNCMCNHKM

SEQ ID NO: 3427 - DNA, 90 bp, Arabidopsis thaliana; identical to SEQ ID NO: 3425
  source 1..90: mol_type = genomic DNA

SEQ ID NO: 3428 - protein, 28 aa, Arabidopsis thaliana
RSSSSIRCFCLINKRRRYGRNCMCNHKM

SEQ ID NO: 3429 - DNA, 63 bp, Arabidopsis thaliana
  source 1..63: mol_type = genomic DNA
taatcaacaagaggcggagatacgggagaaattgcatgtgtaatcataaaatgtagatgttag

SEQ ID NO: 3430 - protein, 19 aa, Arabidopsis thaliana
STRGGDTGEIACVIIKCRC

SEQ ID NO: 3431 - DNA, 186 bp, Arabidopsis thaliana; identical to SEQ ID NO: 3423
  source 1..186: mol_type = genomic DNA

SEQ ID NO: 3432 - protein, 60 aa, Arabidopsis thaliana; identical to SEQ ID NO: 3424

SEQ ID NO: 3433 - DNA, 81 bp, Arabidopsis thaliana
  source 1..81: mol_type = genomic DNA
tgaattccactctgttctcatcggaattgttcttggggtttggcacaattcgggaaatttgaagttttcgccggaatttga

SEQ ID NO: 3434 - protein, 25 aa, Arabidopsis thaliana
IPLCSHRNCSWGLAQFGKFEVFAGI

SEQ ID NO: 3435 - DNA, 117 bp, Arabidopsis thaliana
  source 1..117: mol_type = genomic DNA
tgacgaacacgatctaatttttccttttacatatacaattcccaaactccagatttcttccttattcgtcctgtttcatttctacggttcatgttctctactttcaaccctcgctaa

SEQ ID NO: 3436 - protein, 37 aa, Arabidopsis thaliana
RTRSNFSFYIYNSQTPDFFLIRPVSFLRFMFSTFNPR

SEQ ID NO: 3437 - DNA, 60 bp, Arabidopsis thaliana
  source 1..60: mol_type = genomic DNA
tagattttgaattgggaagctgacaagtttgaagatttctcatttgatggattgatctga

SEQ ID NO: 3438 - protein, 18 aa, Arabidopsis thaliana
ILNWEADKFEDFSFDGLI

SEQ ID NO: 3439 - DNA, 54 bp, Arabidopsis thaliana
  source 1..54: mol_type = genomic DNA
tgatggattgatctgatttcgcaattttcattttcccgtttcgggttcaattga

SEQ ID NO: 3440 - protein, 16 aa, Arabidopsis thaliana
WIDLISQFSFSRFGFN

SEQ ID NO: 3441 - DNA, 144 bp, Arabidopsis thaliana
  source 1..144: mol_type = genomic DNA
tgatttgacaatgacgctacctccaggtctttactccggcaccagctctcttgctctggtggctcgtgcttcggcttttgggttgggtctcgtctatgggaacatgaagctcaagatcaaatcgatgtcacagaagaaggttga

SEQ ID NO: 3442 - protein, 46 aa, Arabidopsis thaliana
FDNDATSRSLLRHQLSCSGGSCFGFWVGSRLWEHEAQDQIDVTEEG

SEQ ID NO: 3443 - DNA, 108 bp, Arabidopsis thaliana
  source 1..108: mol_type = genomic DNA
taaacaaaaacctactcccagaaagttcttccaaatctctcgccatggtttctctcttctttcgtgaattttagtttttctaaatttaattatactttaaattgctaa

SEQ ID NO: 3444 - protein, 34 aa, Arabidopsis thaliana
TKTYSQKVLPNLSPWFLSSFVNFSFSKFNYTLNC

SEQ ID NO: 3445 - DNA, 60 bp, Arabidopsis thaliana
  source 1..60: mol_type = genomic DNA
taaatctacggatacacacgaatacatgtgtacacgcatgtgtatgtacgtactacataa

SEQ ID NO: 3446 - protein, 18 aa, Arabidopsis thaliana
IYGYTRIHVYTHVYVRTT

SEQ ID NO: 3447 - DNA, 87 bp, Arabidopsis thaliana
  source 1..87: mol_type = genomic DNA
tgagttcctcgccaaaaggtgaaatttgagagaatgaatcaacgagagaagctgattgttggtgaaatgtttggagagtttctgtaa

SEQ ID NO: 3448 - protein, 27 aa, Arabidopsis thaliana
VPRQKVKFERMNQREKLIVGEMFGEFL

SEQ ID NO: 3449 - DNA, 165 bp, Arabidopsis thaliana
  source 1..165: mol_type = genomic DNA
tgatggaatcgaaagctggtaataagaagtcaagcagcaatagttccttatgttacgaagcaccccttggttacagcattgaagacgttcgtcctttcggtggaatcaagaaattcaaatcttctgtctactccaactgcgctaagaggccttcctgagtactag

SEQ ID NO: 3450 - protein, 53 aa, Arabidopsis thaliana
WNRKLVIRSQAAIVPYVTKHPLVTALKTFVLSVESRNSNLLSTPTALRGLPEY

SEQ ID NO: 3451 - DNA, 198 bp, Arabidopsis thaliana
  source 1..198: mol_type = genomic DNA
taatcaatattcctctacataaaaagcgtgaatgagattatgatggaatcgaaagctggtaataagaagtcaagcagcaatagttccttatgttacgaagcaccccttggttacagcattgaagacgttcgtcctttcggtggaatcaagaaattcaaatcttctgtctactccaactgcgctaagaggccttcctga

SEQ ID NO: 3452 - protein, 64 aa, Arabidopsis thaliana
SIFLYIKSVNEIMMESKAGNKKSSSNSSLCYEAPLGYSIEDVRPFGGIKKFKSSVYSNCAKRPS

SEQ ID NO: 3453 - DNA, 165 bp, Arabidopsis thaliana; identical to SEQ ID NO: 3449
  source 1..165: mol_type = genomic DNA

SEQ ID NO: 3454 - protein, 53 aa, Arabidopsis thaliana; identical to SEQ ID NO: 3450

SEQ ID NO: 3455 - DNA, 66 bp, Arabidopsis thaliana
  source 1..66: mol_type = genomic DNA
tgaagacgttcgtcctttcggtggaatcaagaaattcaaatcttctgtctactccaactgcgctaa

SEQ ID NO: 3456 - protein, 20 aa, Arabidopsis thaliana
RRSSFRWNQEIQIFCLLQLR

SEQ ID NO: 3457 - DNA, 186 bp, Arabidopsis thaliana
  source 1..186: mol_type = genomic DNA
taaaacagaaaaagcgtgaatgagattatgatggaatcgaaagctggtaataagaagtcaagcagcaatagttccttatgttacgaagcaccccttggttacagcattgaagacgttcgtcctttcggtggaatcaagaaattcaaatcttctgtctactccaactgcgctaagaggccttcctga

SEQ ID NO: 3458 - protein, 60 aa, Arabidopsis thaliana
NRKSVNEIMMESKAGNKKSSSNSSLCYEAPLGYSIEDVRPFGGIKKFKSSVYSNCAKRPS

SEQ ID NO: 3459 - DNA, 165 bp, Arabidopsis thaliana; identical to SEQ ID NO: 3449
  source 1..165: mol_type = genomic DNA

SEQ ID NO: 3460 - protein, 53 aa, Arabidopsis thaliana; identical to SEQ ID NO: 3450

SEQ ID NO: 3461 - DNA, 66 bp, Arabidopsis thaliana; identical to SEQ ID NO: 3455
  source 1..66: mol_type = genomic DNA

SEQ ID NO: 3462 - protein, 20 aa, Arabidopsis thaliana
RRSSFRWNQEIQIFCLLQLR

SEQ ID NO: 3463 - DNA, 78 bp, Arabidopsis thaliana
  source 1..78: mol_type = genomic DNA
tgagtcctctgttcgattacacttcaattattttttatctgcgctgtatctctgttaatgggtttcattaagttttga

SEQ ID NO: 3464 - protein, 24 aa, Arabidopsis thaliana
VLCSITLQLFFICAVSLLMGFIKF

SEQ ID NO: 3465 - DNA, 51 bp, Arabidopsis thaliana
  source 1..51: mol_type = genomic DNA
taagttttgattctcagttgttatatgatttcgaatttcattatatcctga

SEQ ID NO: 3466 - protein, 15 aa, Arabidopsis thaliana
VLILSCYMISNFIIS

SEQ ID NO: 3467 - DNA, 138 bp, Arabidopsis thaliana
  source 1..138: mol_type = genomic DNA
taatacgccgtactgactgctttctccattctacatactccatcatttaccgatatcttcattcctacctacatcaagtccggcagctgccgacgacggcgtcgtagctccgattggcttaaaaaggtggagatctag

SEQ ID NO: 3468 - protein, 44 aa, Arabidopsis thaliana
YAVLTAFSILHTPSFTDIFIPTYIKSGSCRRRRRSSDWLKKVEI

SEQ ID NO: 3469 - DNA, 54 bp, Arabidopsis thaliana
  source 1..54: mol_type = genomic DNA
taaagtaacgcgataaatctaatgcattcccacgatttgtgtttgtccctctga

SEQ ID NO: 3470 - protein, 16 aa, Arabidopsis thaliana
SNAINLMHSHDLCLSL

SEQ ID NO: 3471 - DNA, 66 bp, Arabidopsis thaliana
  source 1..66: mol_type = genomic DNA
tgagattcttctccttgtgttcatgtccaaaggagattcctttcttcattctccttaccttcttaa

SEQ ID NO: 3472 - protein, 20 aa, Arabidopsis thaliana
DSSPCVHVQRRFLSSFSLPS

SEQ ID NO: 3473 - DNA, 108 bp, Arabidopsis thaliana
  source 1..108: mol_type = genomic DNA
taatgggtcatccggccagaaaagtttatcccaaagtctctcgatctattcccatttgactttcttgtcattaattataatcatgctttgtatttgcttgacaaataa

SEQ ID NO: 3474 - protein, 34 aa, Arabidopsis thaliana
WVIRPEKFIPKSLDLFPFDFLVINYNHALYLLDK

SEQ ID NO: 3475 - DNA, 255 bp, Arabidopsis thaliana
  source 1..255: mol_type = genomic DNA
tagatcgtactacaatactatattctcaaaacgatggtgtttccggcgtgtgtacagtgcggaacaagacaaaacccctgtcggtgcaaagtggttggaccaactttagggttcgtggcttttctgataaccggaatcatcgagtggccagttggtgcggtggtgtatatctttaaacacgccaagggtcgtcgtataatgggtcatccggccagaaaagtttatcccaaagtctctcgatctattcccatttga

SEQ ID NO: 3476 - protein, 83 aa, Arabidopsis thaliana
IVLQYYILKTMVFPACVQCGTRQNPCRCKVVGPTLGFVAFLITGIIEWPVGAVVYIFKHAKGRRIMGHPARKVYPKVSRSIPI

SEQ ID NO: 3477 - DNA, 147 bp, Arabidopsis thaliana
  source 1..147: mol_type = genomic DNA
taaacacgccaagggtcgtcgtataatgggtcatccggccagaaaagtttatcccaaagtctctcgatctattcccatttgactttcttgtcattaattataatcatgctttgtatttgcttgacaaataatgattccactttttag

SEQ ID NO: 3478 - protein, 47 aa, Arabidopsis thaliana
TRQGSSYNGSSGQKSLSQSLSIYSHLTFLSLIIIMLCICLTNNDSTF

SEQ ID NO: 3479 - DNA, 123 bp, Arabidopsis thaliana
  source 1..123: mol_type = genomic DNA
taaatccatcactccccccttcaatcatttccctgctctgctggccccagaaacagcttgctaggattcactacgacgtcgtttcgggttcgtctccagctgtggataatggctattctctga

SEQ ID NO: 3480 - protein, 39 aa, Arabidopsis thaliana
IHHSPLQSFPCSAGPRNSLLGFTTTSFRVRLQLWIMAIL

SEQ ID NO: 3481 - DNA, 372 bp, Arabidopsis thaliana
  source 1..372: mol_type = genomic DNA
tgattttcatcatttaaaccaaaaacaaaatggctttttcttttctcaataaacttctcatcatcttcatcttcatcttcatctctctctcttcatcttctccgacaatttctctcgtccaacagctttcaccggagatcgcccctctcctcccttcccccggagacgctttaccttcagacgatggcagcggcacaatcccatcttcaccaagccctcctgatcccgacactaacgacggctcctaccctgacccgttggcattctctccttttgcttctccgccggtttcttctccttctcctccgccgtctcttccttccgccggagtcttactcatctctcttatcatctcctccgcctcgttcctag

SEQ ID NO: 3482 - protein, 122 aa, Arabidopsis thaliana
FSSFKPKTKWLFLFSINFSSSSSSSSSLSLHLLRQFLSSNSFHRRSPLSSLPPETLYLQTMAAAQSHLHQALLIPTLTTAPTLTRWHSLLLLLRRFLLLLLRRLFLPPESYSSLLSSPPPRS

SEQ ID NO: 3483 - DNA, 114 bp, Arabidopsis thaliana
  source 1..114: mol_type = genomic DNA
tgagctgattcgtcacttgtccataaacaaaggaacccaccttcctcattcttcttacctattccttctctttggtttggacatttgattctagtttatgtaatggtttcttga

SEQ ID NO: 3484 - protein, 36 aa, Arabidopsis thaliana
ADSSLVHKQRNPPSSFFLPIPSLWFGHLILVYVMVS

SEQ ID NO: 3485 - DNA, 96 bp, Arabidopsis thaliana
  source 1..96: mol_type = genomic DNA
taaacaaaggaacccaccttcctcattcttcttacctattccttctctttggtttggacatttgattctagtttatgtaatggtttcttgatctga

SEQ ID NO: 3486 - protein, 30 aa, Arabidopsis thaliana
TKEPTFLILLTYSFSLVWTFDSSLCNGFLI

SEQ ID NO: 3487 - DNA, 84 bp, Arabidopsis thaliana
  source 1..84: mol_type = genomic DNA
tagattctctgtgtttcaattcctctcgaagagtttaattcagcatccagaagaacatatttgaatccttttacatttgattga

SEQ ID NO: 3488 - protein, 26 aa, Arabidopsis thaliana
ILCVSIPLEEFNSASRRTYLNPFTFD

SEQ ID NO: 3489 - DNA, 291 bp, Arabidopsis thaliana
  source 1..291: mol_type = genomic DNA
tgaggtatcgggaatcattctcttagcatatctccttttctcgtctcggtggttcgctgtcccacagccactctctctaatccgggctccttaatcttgacgaacagatttcagaagaacatcttctttcttcaactaccaaatctttcgttttttctatctaatttcgccgccatgagttccgttaccgagatcgtgtctgagcagcaagtgatcgacggtattcaggatttggcccttcaaaatcaggttctttgttacccttattcaattcatattctcgtctcttga

SEQ ID NO: 3490 - protein, 95 aa, Arabidopsis thaliana
GIGNHSLSISPFLVSVVRCPTATLSNPGSLILTNRFQKNIFFLQLPNLSFFLSNFAAMSSVTEIVSEQQVIDGIQDLALQNQVLCYPYSIHILVS

SEQ ID NO: 3491 - DNA, 90 bp, Arabidopsis thaliana
  source 1..90: mol_type = genomic DNA
tgaattgagcaacgaatgtttccgatttccaatttaagatcaagatcgttggaatttatgtctttccagcttttttttttgttctcgtga

SEQ ID NO: 3492 - protein, 28 aa, Arabidopsis thaliana
IEQRMFPISNLRSRSLEFMSFQLFFLFS

SEQ ID NO: 3493 - DNA, 285 bp, Arabidopsis thaliana
  source 1..285: mol_type = genomic DNA
taaaaaaactcaccaaacgaggaaagccaaagagagagagagagaaacaaaaatggcgtcacagagttgctacaatggaatccatcgtataaaaagggttcatcctctgattcactctctcacatttcatcgattctcctcatcttctcttccattcaaatctcacattccctcttcacaacaacagcttcgtattcgctcatcttcttcgctttctggcattgttcgtctactcgaggatttcaattttggtcatacaaggtactctttctttcgatctattag

SEQ ID NO: 3494 - protein, 93 aa, Arabidopsis thaliana
KNSPNEESQRERERNKNGVTELLQWNPSYKKGSSSDSLSHISSILLIFSSIQISHSLFTTTASYSLIFFAFWHCSSTRGFQFWSYKVLFLSIY

SEQ ID NO: 3495 - DNA, 114 bp, Arabidopsis thaliana
  source 1..114: mol_type = genomic DNA
tgaatctcgtcttgttcaagccgtttcttagcgggtggctctgatttgaagatgatggtacatatggatttgaagttgattgctttttcttttcttttctttttcttttgttaa

SEQ ID NO: 3496 - protein, 36 aa, Arabidopsis thaliana
ISSCSSRFLAGGSDLKMMVHMDLKLIAFSFLFFFFC

SEQ ID NO: 3497 - DNA, 63 bp, Arabidopsis thaliana
  source 1..63: mol_type = genomic DNA
taaaagagtgtctatctattgattcactttcttcccaaattcttgttccctcgaattgattga

SEQ ID NO: 3498 - protein, 19 aa, Arabidopsis thaliana
KSVYLLIHFLPKFLFPRID

SEQ ID NO: 3499 - DNA, 66 bp, Arabidopsis thaliana
  source 1..66: mol_type = genomic DNA
tgattcactttcttcccaaattcttgttccctcgaattgattgacgaggaagagatttgtatttga

SEQ ID NO: 3500 - protein, 20 aa, Arabidopsis thaliana
FTFFPNSCSLELIDEEEICI

SEQ ID NO: 3501 - DNA, 51 bp, Arabidopsis thaliana
  source 1..51: mol_type = genomic DNA
taaaagcatgaaaatttgttgatgggtttctcttcgacatccagattctag

SEQ ID NO: 3502 - protein, 15 aa, Arabidopsis thaliana
KHENLLMGFSSTSRF

SEQ ID NO: 3503 - DNA, 291 bp, Arabidopsis thaliana
  source 1..291: mol_type = genomic DNA
tgaacaccaaccggggattgtaaagaaagttaccagttgtttttatatattttgtactggcatttttctgatggaaacgggatcatccagcccgatgatggggaggtttactacttccaggaagcttttggccataagcttgtcggtactagccgtgctctcaccactctacatcgacagattatcagaggaagatctagaagaggaagaagaactcttcagctttatgttttccttctctctgcttctcctcttgttgattttagccatagccttgtccttgtacagtga

SEQ ID NO: 3504 - protein, 95 aa, Arabidopsis thaliana
TPTGDCKESYQLFLYILYWHFSDGNGIIQPDDGEVYYFQEAFGHKLVGTSRALTTLHRQIIRGRSRRGRRTLQLYVFLLSASPLVDFSHSLVLVQ

SEQ ID NO: 3505 - DNA, 69 bp, Arabidopsis thaliana
  source 1..69: mol_type = genomic DNA
tgaatctttccgttgaagaaactaaagtttaaatacctaagagaacgtttacttatgagagtgatgtga

SEQ ID NO: 3506 - protein, 21 aa, Arabidopsis thaliana
IFPLKKLKFKYLRERLLMRVM

SEQ ID NO: 3507 - DNA, 150 bp, Arabidopsis thaliana
  source 1..150: mol_type = genomic DNA
tgacgaccttctctctctaaattctctctgtactctgaaaaaaactctttttttttttgtgtgggtttcttaatgatttgttatgaccctgttggattcaaaccaaacccacacgagagaatgatgagaagtagatcaccggttttgtaa

SEQ ID NO: 3508 - protein, 48 aa, Arabidopsis thaliana
RPSLSKFSLYSEKNSFFFCVGFLMICYDPVGFKPNPHERMMRSRSPVL

SEQ ID NO: 3509 - DNA, 51 bp, Arabidopsis thaliana
  source 1..51: mol_type = genomic DNA
tgaccctgttggattcaaaccaaacccacacgagagaatgatgagaagtag

SEQ ID NO: 3510 - protein, 15 aa, Arabidopsis thaliana
PCWIQTKPTRENDEK

SEQ ID NO: 3511 - DNA, 120 bp, Arabidopsis thaliana
  source 1..120: mol_type = genomic DNA
tgatacacttctctccatttcttctttttgttcgccgagaagctaaggagaattcttcctgaaaacgcgttgatggatctgatgtatagctacggattagaattgtgtaattctctctaa

SEQ ID NO: 3512 - protein, 38 aa, Arabidopsis thaliana
YTSLHFFFLFAEKLRRILPENALMDLMYSYGLELCNSL

SEQ ID NO: 3513 - DNA, 120 bp, Arabidopsis thaliana; identical to SEQ ID NO: 3511
  source 1..120: mol_type = genomic DNA

SEQ ID NO: 3514 - protein, 38 aa, Arabidopsis thaliana; identical to SEQ ID NO: 3512

SEQ ID NO: 3515 - DNA, 69 bp, Arabidopsis thaliana
  source 1..69: mol_type = genomic DNA
taggttttaccattttctgtttccaatttcaatcgcgatccgtgcttttttcgatggcgtcgattttga

SEQ ID NO: 3516 - protein, 21 aa, Arabidopsis thaliana
VLPFSVSNFNRDPCFFRWRRF

SEQ ID NO: 3517 - DNA, 234 bp, Arabidopsis thaliana
  source 1..234: mol_type = genomic DNA
tgaagaaggaggaataaacatcgaaatgtcgggctcgaggcttttcttcggagtttctacaattgtatcgataattttcgccattttgttgccgatggcacatgctcaatccgcagctcctgctccggctccaacaagcgacggaacaacgatagaccaaggcatagcatatgtccttatgttggtggctttggtcctcacatatctcatccattgatcctcttgttaatttaa

SEQ ID NO: 3518 - protein, 76 aa, Arabidopsis thaliana
RRRNKHRNVGLEAFLRSFYNCIDNFRHFVADGTCSIRSSCSGSNKRRNNDRPRHSICPYVGGFGPHISHPLILLLI

SEQ ID NO: 3519 - DNA, 57 bp, Arabidopsis thaliana
  source 1..57: mol_type = genomic DNA
tgatttgatattgttccttctcgtatctccattagcacacagcttcaaaggatctga

SEQ ID NO: 3520 - protein, 17 aa, Arabidopsis thaliana
FDIVPSRISISTQLQRI

SEQ ID NO: 3521 - DNA, 63 bp, Arabidopsis thaliana
  source 1..63: mol_type = genomic DNA
taagaaaatttgggagaacaatgtcggcttcttcttcctcctttgaacaacctcaagtcataa

SEQ ID NO: 3522 - protein, 19 aa, Arabidopsis thaliana
ENLGEQCRLLLPPLNNLKS

SEQ ID NO: 3523 - DNA, 66 bp, Arabidopsis thaliana
  source 1..66: mol_type = genomic DNA
taacggactatgggattttcgcttgctgttcgactgaatagatcttcgtctcgttcgtgttgttag

SEQ ID NO: 3524 - protein, 20 aa, Arabidopsis thaliana
RTMGFSLAVRLNRSSSRSCC

SEQ ID NO: 3525 - DNA, 51 bp, Arabidopsis thaliana
  source 1..51: mol_type = genomic DNA
tgaatatggactcattctacttctgtatatacacatgggatccaaacttaa

SEQ ID NO: 3526 - protein, 15 aa, Arabidopsis thaliana
IWTHSTSVYTHGIQT

SEQ ID NO: 3527 - DNA, 51 bp, Arabidopsis thaliana
  source 1..51: mol_type = genomic DNA
taggatacatatgatgactatgaagcagtctttgagtggcagggttcttag

SEQ ID NO: 3528 - protein, 15 aa, Arabidopsis thaliana
DTYDDYEAVFEWQGS

SEQ ID NO: 3529 - DNA, 69 bp, Arabidopsis thaliana
  source 1..69: mol_type = genomic DNA
taaagccagattcaaggtgagtctgagagcttggttcttgtatcttcttgtttaccaatgggaatctag

SEQ ID NO: 3530 - protein, 21 aa, Arabidopsis thaliana
SQIQGESESLVLVSSCLPMGI

SEQ ID NO: 3531 - DNA, 150 bp, Arabidopsis thaliana
  source 1..150: mol_type = genomic DNA
taaaacttttttttttaccatctctctttttttttttacttactccatatgccatcaatgtcaaattgttctttctgtcctttgttcttaattagtgtcaccaccaccaccactacttctatactacaaacccttctcgtattctcttaa

SEQ ID NO: 3532 - protein, 48 aa, Arabidopsis thaliana
NFFFYHLSFFFYLLHMPSMSNCSFCPLFLISVTTTTTTSILQTLLVFS

SEQ ID NO: 3533 - DNA, 150 bp, Arabidopsis thaliana; identical to SEQ ID NO: 3531
  source 1..150: mol_type = genomic DNA

SEQ ID NO: 3534 - protein, 48 aa, Arabidopsis thaliana; identical to SEQ ID NO: 3532

SEQ ID NO: 3535 - DNA, 108 bp, Arabidopsis thaliana
  source 1..108: mol_type = genomic DNA
tagtttcgcatccctcctatgtctttctttctagatcttaaagcagagtcattgcttaaccctaattatcactgttcttgtataaaacacttttcacctaatcattga

SEQ ID NO: 3536 - protein, 34 aa, Arabidopsis thaliana
FRIPPMSFFLDLKAESLLNPNYHCSCIKHFSPNH

SEQ ID NO: 3537 - DNA, 63 bp, Arabidopsis thaliana
  source 1..63: mol_type = genomic DNA
tgatgcccatccccaacggaaactaccggagcaaaacggcggcggcggcggcggcggttctaa

SEQ ID NO: 3538 - protein, 19 aa, Arabidopsis thaliana
CPSPTETTGAKRRRRRRRF

SEQ ID NO: 3539 - DNA, 69 bp, Arabidopsis thaliana
  source 1..69: mol_type = genomic DNA
taatcagagggtttttctgtttttgtgttgcttcgttactacggttacattcttctcttccccttttga

SEQ ID NO: 3540 - protein, 21 aa, Arabidopsis thaliana
SEGFSVFVLLRYYGYILLFPF

SEQ ID NO: 3541 - DNA, 96 bp, Arabidopsis thaliana
  source 1..96: mol_type = genomic DNA
tgatctgacccatttctcaagaatctctctttcttcttaattcattggtgttttaaccttttcatcgattccaattctcaattgttgtctgtttga

SEQ ID NO: 3542 - protein, 30 aa, Arabidopsis thaliana
SDPFLKNLSFFLIHWCFNLFIDSNSQLLSV

SEQ ID NO: 3543 - DNA, 96 bp, Arabidopsis thaliana; identical to SEQ ID NO: 3541
  source 1..96: mol_type = genomic DNA

SEQ ID NO: 3544 - protein, 30 aa, Arabidopsis thaliana; identical to SEQ ID NO: 3542

SEQ ID NO: 3545 - DNA, 108 bp, Arabidopsis thaliana
  source 1..108: mol_type = genomic DNA
taaacagtcgatttcttacaaaaattctcacttccgtgcaagcaaatgcagtcttgtttcgagtttgattcacacaagattggaatagaggagacattgtctctttga

SEQ ID NO: 3546 - protein, 34 aa, Arabidopsis thaliana
TVDFLQKFSLPCKQMQSCFEFDSHKIGIEETLSL

SEQ ID NO: 3547 - DNA, 144 bp, Arabidopsis thaliana
  source 1..144: mol_type = genomic DNA
tgattctctcttcaatcatttttttttctttcttttagattgtttttgatcctgaaatgctcaaaaagtcgtcgtactaatccactatcgtgttggaagatgaaacagagtgaaagagacagaagaaacaagaaccatttgtga

SEQ ID NO: 3548 - protein, 46 aa, Arabidopsis thaliana
FSLQSFFFLSFRLFLILKCSKSRRTNPLSCWKMKQSERDRRNKNHL

SEQ ID NO: 3549 - DNA, 57 bp, Arabidopsis thaliana
  source 1..57: mol_type = genomic DNA
tgaaatcaagaaccatcattattccatcaccagacacagaattgttcaatcatttga

SEQ ID NO: 3550 - protein, 17 aa, Arabidopsis thaliana
NQEPSLFHHQTQNCSII

SEQ ID NO: 3551 - DNA, 93 bp, Arabidopsis thaliana
  source 1..93: mol_type = genomic DNA
tgatttttgggtaaacgggaacatgttgataatggatacaacgacccaaatcttcaagatcctaaagcagaaagatcagagtttcattgttaa

SEQ ID NO: 3552 - protein, 29 aa, Arabidopsis thaliana
FLGKREHVDNGYNDPNLQDPKAERSEFHC

SEQ ID NO: 3553 - DNA, 717 bp, Arabidopsis thaliana
  source 1..717: mol_type = genomic DNA
tgattaaatatggtggatacggttattcccggagatatggcttgtttggatgcagatttgttgcagcttcaggaaatgtcttcctttgttctcaattctaaacctggattcactcagaagctcttcgaccagtggctttctcttcccgaagctcagcgacaggttggatcattgcttaaggatgctgtagctggagctcctatcaatgttactggaagtgcatcgggttctaattctgccactataccatctatgtttcctgcgggaagcgctcctcctctttcaccaagaagttgtggttcaccccgtacaaccaaacagagagccccttctaacttaggttctactctcaaagtagtcaacgagcctgttaaagagcctatacctcagttttatttccaaaatggtcgccctccaccaagcgagattaaagagcaatgtatgtttagaatcaatcacttcttttatggtcacatggatggcttgcagatacaagaattcaagttagtcaccagagaaatctgcaagctcccatctttcttctccacttcccttttccggaagatcgatctcaacaatacaggttttgttactagagatgcatttattgatttttgggtaaacgggaacatgttgataatggatacaacgacccaaatcttcaagatcctaaagcagaaagatcagagtttcattgttaaggtaattttcttttga

SEQ ID NO: 3554 - protein, 237 aa, Arabidopsis thaliana
LNMVDTVIPGDMACLDADLLQLQEMSSFVLNSKPGFTQKLFDQWLSLPEAQRQVGSLLKDAVAGAPINVTGSASGSNSATIPSMFPAGSAPPLSPRSCGSPRTTKQRAPSNLGSTLKVVNEPVKEPIPQFYFQNGRPPPSEIKEQCMFRINHFFYGHMDGLQIQEFKLVTREICKLPSFFSTSLFRKIDLNNTGFVTRDAFIDFWVNGNMLIMDTTTQIFKILKQKDQSFIVKVIFF

SEQ ID NO: 3555 - DNA, 96 bp, Arabidopsis thaliana
  source 1..96: mol_type = genomic DNA
tgaacatggagaagatttttgaggattcagttccttgtagggttcgtgctaaacgtggttgtgctactcatcctcgtagcattgctgaacgggtga

SEQ ID NO: 3556 - protein, 30 aa, Arabidopsis thaliana
TWRRFLRIQFLVGFVLNVVVLLILVALLNG

SEQ ID NO: 3557 - DNA, 57 bp, Arabidopsis thaliana
  source 1..57: mol_type = genomic DNA
tgattggatgagaataaggggttatgggacttgagtcaattgggtttgtctccctaa

SEQ ID NO: 3558 - protein, 17 aa, Arabidopsis thaliana
LDENKGLWDLSQLGLSP

SEQ ID NO: 3559 - DNA, 60 bp, Arabidopsis thaliana
  source 1..60: mol_type = genomic DNA
taaggggttatgggacttgagtcaattgggtttgtctccctaatcatcgcaaattcctga

SEQ ID NO: 3560 - protein, 18 aa, Arabidopsis thaliana
GVMGLESIGFVSLIIANS

SEQ ID NO: 3561 - DNA, 57 bp, Arabidopsis thaliana; identical to SEQ ID NO: 3557
  source 1..57: mol_type = genomic DNA

SEQ ID NO: 3562 - protein, 17 aa, Arabidopsis thaliana
LDENKGLWDLSQLGLSP

SEQ ID NO: 3563 - DNA, 60 bp, Arabidopsis thaliana; identical to SEQ ID NO: 3559
  source 1..60: mol_type = genomic DNA

SEQ ID NO: 3564 - protein, 18 aa, Arabidopsis thaliana
GVMGLESIGFVSLIIANS

SEQ ID NO: 3565 - DNA, 117 bp, Arabidopsis thaliana
  source 1..117: mol_type = genomic DNA
tgatgcttggaacttcctgttagacgacgaatcctgctttcacatccatcgtctgctttcattttcaaaggttttttcgttcttgactcacagaatcaatgtagagttatcaattga

SEQ ID NO: 3566 - protein, 37 aa, Arabidopsis thaliana
CLELPVRRRILLSHPSSAFIFKGFFVLDSQNQCRVIN

SEQ ID NO: 3567 - DNA, 78 bp, Arabidopsis thaliana
  source 1..78: mol_type = genomic DNA
tgaaagcagctttctaagtccgatacgagatcgccgtttctagggctcttttggtgtccctctacctctcgcgcttga

SEQ ID NO: 3568 - protein, 24 aa, Arabidopsis thaliana
KQLSKSDTRSPFLGLFWCPSTSRA

SEQ ID NO: 3569 - DNA, 78 bp, Arabidopsis thaliana
  source 1..78: mol_type = genomic DNA
tagcgttttctctcgtcgcatcttctcttttcatctttgaccctaaaactttgcaaatctcgagctttcagaaagtag

SEQ ID NO: 3570 - protein, 24 aa, Arabidopsis thaliana
RFLSSHLLFSSLTLKLCKSRAFRK

SEQ ID NO: 3571 - DNA, 102 bp, Arabidopsis thaliana
  source 1..102: mol_type = genomic DNA
tgagtgattctagcgttttctctcgtcgcatcttctcttttcatctttgaccctaaaactttgcaaatctcgagctttcagccagaaagtagccatccttga

SEQ ID NO: 3572 - protein, 32 aa, Arabidopsis thaliana
VILAFSLVASSLFIFDPKTLQISSFQPESSHP

SEQ ID NO: 3573 - DNA, 105 bp, Arabidopsis thaliana
  source 1..105: mol_type = genomic DNA
tgatcgaattctaaacacaattatgaagtaacgacgatgaactcgaagctttgtcatttggggacttcgatggatacgattcgctgcgattccgatatcttctga

SEQ ID NO: 3574 - protein, 33 aa, Arabidopsis thaliana
SNSKHNYEVTTMNSKLCHLGTSMDTIRCDSDIF

SEQ ID NO: 3575 - DNA, 141 bp, Arabidopsis thaliana
  source 1..141: mol_type = genomic DNA
tgatcatcgtgtctctctgttccgctctccttcgatggaatcagatgcgatataccaagaatggtcttcctcctggaaccatgggctggccaatctttggcgaaaccaccgagtttctcaaacaaggccccaacttcatga

SEQ ID NO: 3576 - protein, 45 aa, Arabidopsis thaliana
SSCLSVPLSFDGIRCDIPRMVFLLEPWAGQSLAKPPSFSNKAPTS

SEQ ID NO: 3577 - DNA, 81 bp, Arabidopsis thaliana
  source 1..81: mol_type = genomic DNA
taacttcaaatgttgaaactttgcttttcttcttcttctcttttggtcaaattttgtgttctctctagagcaaaaccctaa

SEQ ID NO: 3578 - protein, 25 aa, Arabidopsis thaliana
LQMLKLCFSSSSLLVKFCVLSRAKP

SEQ ID NO: 3579 - DNA, 105 bp, Arabidopsis thaliana
  source 1..105: mol_type = genomic DNA
taaacttgcaacgaaagaccaatgtctctctctcgcatcgtcttcttagttagcgatttcctcatttttcttatacaatctgattcggatcgagttcttctttga

SEQ ID NO: 3580 - protein, 33 aa, Arabidopsis thaliana
TCNERPMSLSRIVFLVSDFLIFLIQSDSDRVLL

SEQ ID NO: 3581 - DNA, 66 bp, Arabidopsis thaliana
  source 1..66: mol_type = genomic DNA
tagttagcgatttcctcatttttcttatacaatctgattcggatcgagttcttctttgatgggtaa

SEQ ID NO: 3582 - protein, 20 aa, Arabidopsis thaliana
LAISSFFLYNLIRIEFFFDG

SEQ ID NO: 3583 - DNA, 129 bp, Arabidopsis thaliana
  source 1..129: mol_type = genomic DNA
taaagccgactgattcgcttctcttactacttcaatttcatttctttctcctcaaaatatcagatcgataaccaacaagcgaaactagggttctctaatctcgacgaagatggcgatgcagaaagctaa

SEQ ID NO: 3584 - protein, 41 aa, Arabidopsis thaliana
SRLIRFSYYFNFISFSSKYQIDNQQAKLGFSNLDEDGDAES

SEQ ID NO: 3585 - DNA, 57 bp, Arabidopsis thaliana
  source 1..57: mol_type = genomic DNA
tgacggaagctaaaaccacaccaaccccttcctcctccattttgtactagtagttga

SEQ ID NO: 3586 - protein, 17 aa, Arabidopsis thaliana
RKLKPHQPLPPPFCTSS

SEQ ID NO: 3587 - DNA, 93 bp, Arabidopsis thaliana
  source 1..93: mol_type = genomic DNA
tgagatcgattggtacaagtgttcatccaatggttggaggaggagttatccggcagcttcttagaaggaaacttcattcccaatcagtcgtga

SEQ ID NO: 3588 - protein, 29 aa, Arabidopsis thaliana
DRLVQVFIQWLEEELSGSFLEGNFIPNQS

SEQ ID NO: 3589 - DNA, 72 bp, Arabidopsis thaliana
  source 1..72: mol_type = genomic DNA
taaattttatgtctcatctctttaatgtggacatcaatggatgaactgtggatgcctgtaacttatgcttag

SEQ ID NO: 3590 - protein, 22 aa, Arabidopsis thaliana
ILCLISLMWTSMDELWMPVTYA

SEQ ID NO: 3591 - DNA, 141 bp, Arabidopsis thaliana
  source 1..141: mol_type = genomic DNA
tagggttttaggagctatctctattgtcttggttctgatacaaagttttgtaattttcatggtatgagaagatttgcctttctattttgtttattggttctttttaactttttcttggagatgggttcttgtagatcttaa

SEQ ID NO: 3592 - protein, 45 aa, Arabidopsis thaliana
GFRSYLYCLGSDTKFCNFHGMRRFAFLFCLLVLFNFFLEMGSCRS

SEQ ID NO: 3593 - DNA, 138 bp, Arabidopsis thaliana
  source 1..138: mol_type = genomic DNA
tgatctagtgagatcagaatcacttgcgaattcttcaggggttttgaagaagtttctctactcttctgggacgtgggaacaaggtttagtctgcaaggatggctacaaattctacaaaagcttgtcctgctccgatga

SEQ ID NO: 3594 - protein, 44 aa, Arabidopsis thaliana
SSEIRITCEFFRGFEEVSLLFWDVGTRFSLQGWLQILQKLVLLR

SEQ ID NO: 3595 - DNA, 63 bp, Arabidopsis thaliana
  source 1..63: mol_type = genomic DNA
tgattggatcgtttcttacaagaggattggtgtacgaaaatcatattctcatttgtttgctaa

SEQ ID NO: 3596 - protein, 19 aa, Arabidopsis thaliana
LDRFLQEDWCTKIIFSFVC

SEQ ID NO: 3597 - DNA, 168 bp, Arabidopsis thaliana
  source 1..168: mol_type = genomic DNA
tgatttcgtctctctttgttcttttcaccttttttttttgttttggttttgtctcttccgtttcattttgtgtttcttcaatctgatctaaagcttttgtctgaaaaaaagtgtcagactttctatgaagatgttgttggtcaatgggtgatttttagtttgtgttaa

SEQ ID NO: 3598 - protein, 54 aa, Arabidopsis thaliana
FRLSLFFSPFFFVLVLSLPFHFVFLQSDLKLLSEKKCQTFYEDVVGQWVIFSLC

SEQ ID NO: 3599 - DNA, 63 bp, Arabidopsis thaliana
  source 1..63: mol_type = genomic DNA
taaagcttttgtctgaaaaaaagtgtcagactttctatgaagatgttgttggtcaatgggtga

SEQ ID NO: 3600 - protein, 19 aa, Arabidopsis thaliana
SFCLKKSVRLSMKMLLVNG

SEQ ID NO: 3601 - DNA, 108 bp, Arabidopsis thaliana
  source 1..108: mol_type = genomic DNA
tgatatttccactgctcttttcgatgtttattccttcactttgttcacttgctcttagtttttatctttcactctctctctctcacaccaaagttcacagcaaaataa

SEQ ID NO: 3602 - protein, 34 aa, Arabidopsis thaliana
YFHCSFRCLFLHFVHLLLVFIFHSLSLTPKFTAK

SEQ ID NO: 3603 - DNA, 72 bp, Arabidopsis thaliana
  source 1..72: mol_type = genomic DNA
tgagtacaacacttcttcttcttctctctaagtccagttaaaaatcatctctttgcaatgttgactctttaa

SEQ ID NO: 3604 - protein, 22 aa, Arabidopsis thaliana
VQHFFFFSLSPVKNHLFAMLTL

SEQ ID NO: 3605 - DNA, 246 bp, Arabidopsis thaliana
  source 1..246: mol_type = genomic DNA
taatggagttttgagagagtcgagcacttaagtaatggctacaaagacatcaaatttaggtcatcttcttctgtctttgtttattctgctcttgtttatcttatctcaagttggagtcgcccaggccaaacgtctccaacaaaggaacaaattgcgtttggattgcgttcctcttcctcctccccctccacctctccgtggcatcgtcaaacctcctatcgcttcgtttcactctgcatcgcctaa

SEQ ID NO: 3606 - protein, 80 aa, Arabidopsis thaliana
WSFERVEHLSNGYKDIKFRSSSSVFVYSALVYLISSWSRPGQTSPTKEQIAFGLRSSSSSPSTSPWHRQTSYRFVSLCIA

SEQ ID NO: 3607 - DNA, 96 bp, Arabidopsis thaliana
  source 1..96: mol_type = genomic DNA
taatttatttatcgtttcgcgtgtcgccttctctctttctctcattctctctctctctttcccttcgtatctctctctcgtgaggccgtgccctag

SEQ ID NO: 3608 - protein, 30 aa, Arabidopsis thaliana
FIYRFACRLLSFSHSLSLFPFVSLSREAVP

SEQ ID NO: 3609 - DNA, 144 bp, Arabidopsis thaliana
  source 1..144: mol_type = genomic DNA
taagaaattttaatcgaatttgggataaaaattgagaagctaatagagcggattatgtgggatggatcgcgattatatcagcgaattgccggattctttactaactcagatactcttagagcttcgaaccaaagattctgttaa

SEQ ID NO: 3610 - protein, 46 aa, Arabidopsis thaliana
EILIEFGIKIEKLIERIMWDGSRLYQRIAGFFTNSDTLRASNQRFC

SEQ ID NO: 3611 - DNA, 141 bp, Arabidopsis thaliana
  source 1..141: mol_type = genomic DNA
tagatttcttcaccagtcttcttcttcttctgcctccaaactctctctttctctctcgagaaccttaagaaaacgttacaaatggctgttgaagcaagacacatgaatctcttctcttctcaatacattaccaacaggtaa

SEQ ID NO: 3612 - protein, 45 aa, Arabidopsis thaliana
ISSPVFFFFCLQTLSFSLENLKKTLQMAVEARHMNLFSSQYITNR

SEQ ID NO: 3613 - DNA, 123 bp, Arabidopsis thaliana
  source 1..123: mol_type = genomic DNA
taaaaagcctccctccatagatttcttcaccagtcttcttcttcttctgcctccaaactctctctttctctctcgagaaccttaagaaaacgttacaaatggctgttgaagcaagacacatga

SEQ ID NO: 3614 - protein, 39 aa, Arabidopsis thaliana
KASLHRFLHQSSSSSASKLSLSLSRTLRKRYKWLLKQDT

SEQ ID NO: 3615 - DNA, 132 bp, Arabidopsis thaliana
  source 1..132: mol_type = genomic DNA
tgagatatggaacaagattacatctgctcagggtgctaccagtatcgagttttttcattgcaagaagcactcgattggcggtttcttgtgcactcagatttccttatcggctctttcgtgaactgcacctag

SEQ ID NO: 3616 - protein, 42 aa, Arabidopsis thaliana
DMEQDYICSGCYQYRVFSLQEALDWRFLVHSDFLIGSFVNCT

SEQ ID NO: 3617 - DNA, 354 bp, Arabidopsis thaliana
  source 1..354: mol_type = genomic DNA
tagctgagatattataaagtagggtttaatttgttattatcacgagaaccacacaaatacgcggcaaagagagagaaagatagagagagagagagagagagagagagaaagcggtggagtcgtgataagggagaagctctggatacagtctcttcccgtcgtcggagacggagtttatgcctattggctcctgaggttagattaagcttcgtatttagtggattttcttcttttgagatatggaacaagattacatctgctcagggtgctaccagtatcgagttttttcattgcaagaagcactcgattggcggtttcttgtgcactcagatttccttatcggctctttcgtga

SEQ ID NO: 3618 - protein, 116 aa, Arabidopsis thaliana
LRYYKVGFNLLLSREPHKYAAKREKDRERERERERKRWSRDKGEALDTVSSRRRRRSLCLLAPEVRLSFVFSGFSSFEIWNKITSAQGATSIEFFHCKKHSIGGFLCTQISLSALS

SEQ ID NO: 3619 - DNA, 132 bp, Arabidopsis thaliana; identical to SEQ ID NO: 3615
  source 1..132: mol_type = genomic DNA

SEQ ID NO: 3620 - protein, 42 aa, Arabidopsis thaliana; identical to SEQ ID NO: 3616

SEQ ID NO: 3621 - DNA, 135 bp, Arabidopsis thaliana
  source 1..135: mol_type = genomic DNA
taagtttcgtccagctacccagaacattactttttgttagtgcgtcttccaattctcagtatgttttgtctttttctcttagcgtctttcttttgccttgttggtcaacccattgatgttcaaacttcaaagtaa

SEQ ID NO: 3622 - protein, 43 aa, Arabidopsis thaliana
VSSSYPEHYFLLVRLPILSMFCLFLLASFFCLVGQPIDVQTSK

SEQ ID NO: 3623 - DNA, 93 bp, Arabidopsis thaliana
  source 1..93: mol_type = genomic DNA
tgagagcttctggtaaaaaaagaaaagaaaagaaaaagaacaacatcaatggcgtcccaaaaacattccacaaaccccaaacttttcaagtaa

SEQ ID NO: 3624 - protein, 29 aa, Arabidopsis thaliana
ELLVKKEKKRKRTTSMASQKHSTNPKLFK

SEQ ID NO: 3625 - DNA, 108 bp, Arabidopsis thaliana
  source 1..108: mol_type = genomic DNA
taaaaaaagaaaagaaaagaaaaagaacaacatcaatggcgtcccaaaaacattccacaaaccccaaacttttcaagtaaatctgaggaaaaaaaaacatctcaataa

SEQ ID NO: 3626 - protein, 34 aa, Arabidopsis thaliana
KKKRKEKEQHQWRPKNIPQTPNFSSKSEEKKTSQ

SEQ ID NO: 3627 - DNA, 282 bp, Arabidopsis thaliana
  source 1..282: mol_type = genomic DNA
taatcaagggactttttgttcgggtttggttttaaacgtcttggattcgaagtggttaaggtatggatgaaaataatggaggttcaagctcacttccacctttccttactaaaacatatgaaatggttgatgattcttcttctgactcggtcgttgcttggagcgaaaacaacaaaagcttcatcgtcaagaatccagcagagttttcaagagaccttcttccgagattcttcaagcataagaatttctcaagtttcatccgtcagcttaatacatatgtaa

SEQ ID NO: 3628 - protein, 92 aa, Arabidopsis thaliana
SRDFLFGFGFKRLGFEVVKVWMKIMEVQAHFHLSLLKHMKWLMILLLTRSLLGAKTTKASSSRIQQSFQETFFRDSSSIRISQVSSVSLIHM

SEQ ID NO: 3629 - DNA, 99 bp, Arabidopsis thaliana
  source 1..99: mol_type = genomic DNA
tgactcggtcgttgcttggagcgaaaacaacaaaagcttcatcgtcaagaatccagcagagttttcaagagaccttcttccgagattcttcaagcataa

SEQ ID NO: 3630 - protein, 31 aa, Arabidopsis thaliana
LGRCLERKQQKLHRQESSRVFKRPSSEILQA

SEQ ID NO: 3631 - DNA, 51 bp, Arabidopsis thaliana
  source 1..51: mol_type = genomic DNA
tgagctccatctcttctaagccatgggaaacacattccaagacgaagttaa

SEQ ID NO: 3632 - protein, 15 aa, Arabidopsis thaliana
APSLLSHGKHIPRRS

SEQ ID NO: 3633 - DNA, 108 bp, Arabidopsis thaliana
  source 1..108: mol_type = genomic DNA
taaaaagtaaatcagaatcccgaagcaaactttcaatcttccatcatcatcatcatgtccgatacacatacatacatacatatctttcgtgtgatttatacttattaa

SEQ ID NO: 3634 - protein, 34 aa, Arabidopsis thaliana
KVNQNPEANFQSSIIIIMSDTHTYIHIFRVIYTY

SEQ ID NO: 3635 - DNA, 54 bp, Arabidopsis thaliana
  source 1..54: mol_type = genomic DNA
tagttttgttgtctctctccttcagtttccaggaaaaaatctctttctcattaa

SEQ ID NO: 3636 - protein, 16 aa, Arabidopsis thaliana
FCCLSPSVSRKKSLSH

SEQ ID NO: 3637 - DNA, 57 bp, Arabidopsis thaliana
  source 1..57: mol_type = genomic DNA
tgatggggagtgagtaatatcagaaatcaagctttttcacaatctcagaaattgtag

SEQ ID NO: 3638 - protein, 17 aa, Arabidopsis thaliana
WGVSNIRNQAFSQSQKL

SEQ ID NO: 3639 - DNA, 150 bp, Arabidopsis thaliana
  source 1..150: mol_type = genomic DNA
taaatcaatcaacaaaacaaaaaaaactctatagttagtttctctgaaaatgtacggacagtgcaatatagaatccgactacgctttgttggagtcgataacacgtcacttgctaggaggaggaggagagaacgagctgcgactcaatga

SEQ ID NO: 3640 - protein, 48 aa, Arabidopsis thaliana
INQQNKKNSIVSFSENVRTVQYRIRLRFVGVDNTSLARRRRRERAATQ

SEQ ID NO: 3641 - DNA, 153 bp, Arabidopsis thaliana
  source 1..153: mol_type = genomic DNA
tagttcgtcctgcacaaagttctgtttccctatttctactcccccgattcagacatcctgttctgtacaaagatctgttttaaatttgctactctcatcttagttctctttctcaatcttgagcacaatgaattgctgttggcaggtagttga

SEQ ID NO: 3642 - protein, 49 aa, Arabidopsis thaliana
FVLHKVLFPYFYSPDSDILFCTKICFKFATLILVLFLNLEHNELLLAGS

SEQ ID NO: 3643 - DNA, 126 bp, Arabidopsis thaliana
  source 1..126: mol_type = genomic DNA
tgaagacaccgctctctactcgattcctatgattactctctagatccttttcaatttccccccgaaaggtttctcgattttgatcccccaaatcggagcttggagctaccggatcttatggagtga

SEQ ID NO: 3644 - protein, 40 aa, Arabidopsis thaliana
RHRSLLDSYDYSLDPFQFPPERFLDFDPPNRSLELPDLME

SEQ ID NO: 3645 - DNA, 75 bp, Arabidopsis thaliana
  source 1..75: mol_type = genomic DNA
tagatttcaagatcgatctatcttctttctcgtgaagacaccgctctctactcgattcctatgattactctctag

SEQ ID NO: 3646 - protein, 23 aa, Arabidopsis thaliana
ISRSIYLLSREDTALYSIPMITL

SEQ ID NO: 3647 - DNA, 75 bp, Arabidopsis thaliana; identical to SEQ ID NO: 3645
  source 1..75: mol_type = genomic DNA

SEQ ID NO: 3648 - protein, 23 aa, Arabidopsis thaliana
ISRSIYLLSREDTALYSIPMITL

SEQ ID NO: 3649 - DNA, 126 bp, Arabidopsis thaliana; identical to SEQ ID NO: 3643
  source 1..126: mol_type = genomic DNA

SEQ ID NO: 3650 - protein, 40 aa, Arabidopsis thaliana; identical to SEQ ID NO: 3644

SEQ ID NO: 3651 - DNA, 54 bp, Arabidopsis thaliana
  source 1..54: mol_type = genomic DNA
taatcggtgttgcttccacaaggcttcatgagcttgtataacaagtttctctag

SEQ ID NO: 3652 - protein, 16 aa, Arabidopsis thaliana
SVLLPQGFMSLYNKFL

SEQ ID NO: 3653 - DNA, 57 bp, Arabidopsis thaliana
  source 1..57: mol_type = genomic DNA
taaaaacaaaaaattctgatgagaatgatagtcctcgcctcctctacaaaggtgtaa

SEQ ID NO: 3654 - protein, 17 aa, Arabidopsis thaliana
KQKILMRMIVLASSTKV

SEQ ID NO: 3655 - DNA, 81 bp, Arabidopsis thaliana
  source 1..81: mol_type = genomic DNA
tgattctcatcatctctgcattttctgaattggctcagacataatttcttcggtgacttccatggctccgcctgtctctga

SEQ ID NO: 3656 - protein, 25 aa, Arabidopsis thaliana
FSSSLHFLNWLRHNFFGDFHGSACL

SEQ ID NO: 3657 - DNA, 105 bp, Arabidopsis thaliana
  source 1..105: mol_type = genomic DNA
tgaagatttcatactttttctggcaattctgtttggtttcagaggaaggagtcaaaacaatggggatcgtttcagaagaagccattgatgaattccaagagctga

SEQ ID NO: 3658 - protein, 33 aa, Arabidopsis thaliana
RFHTFSGNSVWFQRKESKQWGSFQKKPLMNSKS

SEQ ID NO: 3659 - DNA, 129 bp, Arabidopsis thaliana
  source 1..129: mol_type = genomic DNA
tgaccaagaaccacaaagaggaggaaatcaaatggtttttgggagtttgatggattgattgattattcagcaaatcccacagaagaaatcagaagctgcttcttattttttggtcacgaccagtcttaa

SEQ ID NO: 3660 - protein, 41 aa, Arabidopsis thaliana
PRTTKRRKSNGFWEFDGLIDYSANPTEEIRSCFLFFGHDQS

SEQ ID NO: 3661 - DNA, 120 bp, Arabidopsis thaliana
  source 1..120: mol_type = genomic DNA
tgacccaaaaaaaaaaaaaaaaaagtcgatcttgaagatttcatactttttctggcaattctgtttggtttcagaggaaggagtcaaaacaatggggatcgtttcagaagaagccattga

SEQ ID NO: 3662 - protein, 38 aa, Arabidopsis thaliana
PKKKKKKVDLEDFILFLAILFGFRGRSQNNGDRFRRSH

SEQ ID NO: 3663 - DNA, 105 bp, Arabidopsis thaliana
  source 1..105: mol_type = genomic DNA
tgaaaacctagcgagaagctgagatttaccaacagcagagtcgccgatcaagactaccttgaacacataatctatcttctgattgaaattgctctgaaattttga

SEQ ID NO: 3664 - protein, 33 aa, Arabidopsis thaliana
KPSEKLRFTNSRVADQDYLEHIIYLLIEIALKF

SEQ ID NO: 3665 - DNA, 60 bp, Arabidopsis thaliana
  source 1..60: mol_type = genomic DNA
tgaaattgctctgaaattttgacatcgttcacaccaaaatcacaagcttatagattttag

SEQ ID NO: 3666 - protein, 18 aa, Arabidopsis thaliana
NCSEILTSFTPKSQAYRF

SEQ ID NO: 3667 - DNA, 255 bp, Arabidopsis thaliana
  source 1..255: mol_type = genomic DNA
taacgtgtaagtaggacccacttttgtgattatccgccgcacagaagtctctcctccactccacaaatagcattcccggcgagagacagagagcgaagaagaagactcaaaccaaaaaaaaaaatggaagctgcactgctttctcttcagcccttcccttcctccgccactcaacgacgtctctctccgtttaacctccacaatacacttaccagaccttcttcttatgctcctcttcgtgctcaaaagtgctga

SEQ ID NO: 3668 - protein, 83 aa, Arabidopsis thaliana
RVSRTHFCDYPPHRSLSSTPQIAFPARDRERRRRLKPKKKMEAALLSLQPFPSSATQRRLSPFNLHNTLTRPSSYAPLRAQKC

SEQ ID NO: 3669 - DNA, 72 bp, Arabidopsis thaliana
  source 1..72: mol_type = genomic DNA
taacctccacaatacacttaccagaccttcttcttatgctcctcttcgtgctcaaaagtgctgattcattga

SEQ ID NO: 3670 - protein, 22 aa, Arabidopsis thaliana
PPQYTYQTFFLCSSSCSKVLIH

SEQ ID NO: 3671 - DNA, 117 bp, Arabidopsis thaliana
  source 1..117: mol_type = genomic DNA
tagaattcgctgtcattttcacaacgactcacttctttcagctctctccattcggcgctctcttctggaattgaagaatcaagcaatggcccatacatcagaatctgtgaatcctag

SEQ ID NO: 3672 - protein, 37 aa, Arabidopsis thaliana
NSLSFSQRLTSFSSLHSALSSGIEESSNGPYIRICES

SEQ ID NO: 3673 - DNA, 180 bp, Arabidopsis thaliana
  source 1..180: mol_type = genomic DNA
tagaggcgcgtcgatgctctgtcccgaagacgcagcggaaaccaccaccaacgaatcgtatcggaacttacgacgcgaggggagaaaaacgcaatcgccgccgcggttttgtttaacgaaattgcggcgcgatgggggaaacgggagagatccgtggtgggagagagaggtgtccattga

SEQ ID NO: 3674 - protein, 58 aa, Arabidopsis thaliana
RRVDALSRRRSGNHHQRIVSELTTRGEKNAIAAAVLFNEIAARWGKRERSVVGERGVH

SEQ ID NO: 3675 - DNA, 93 bp, Arabidopsis thaliana
  source 1..93: mol_type = genomic DNA
taacgaaattgcggcgcgatgggggaaacgggagagatccgtggtgggagagagaggtgtccattgaaagagataagcaaaaaacgattgtga

SEQ ID NO: 3676 - protein, 29 aa, Arabidopsis thaliana
RNCGAMGETGEIRGGRERCPLKEISKKRL

SEQ ID NO: 3677 - DNA, 78 bp, Arabidopsis thaliana
  source 1..78: mol_type = genomic DNA
tgaggattgattgatgcgcgagtcagtatttatccccaatttcccaattgggtttctgccactgagttgattgattaa

SEQ ID NO: 3678 - protein, 24 aa, Arabidopsis thaliana
GLIDARVSIYPQFPNWVSATELID

SEQ ID NO: 3679 - DNA, 63 bp, Arabidopsis thaliana
  source 1..63: mol_type = genomic DNA
tgattgatgcgcgagtcagtatttatccccaatttcccaattgggtttctgccactgagttga

SEQ ID NO: 3680 - protein, 19 aa, Arabidopsis thaliana
LMRESVFIPNFPIGFLPLS

SEQ ID NO: 3681 - DNA, 54 bp, Arabidopsis thaliana
  source 1..54: mol_type = genomic DNA
tgatgcgcgagtcagtatttatccccaatttcccaattgggtttctgccactga

SEQ ID NO: 3682 - protein, 16 aa, Arabidopsis thaliana
CASQYLSPISQLGFCH

SEQ ID NO: 3683 - DNA, 75 bp, Arabidopsis thaliana
  source 1..75: mol_type = genomic DNA
tagatttcacaaaatcgattggctgtcaaatttctctccggcgattttcctcgagtgaaattcggctcaaggtga

SEQ ID NO: 3684 - protein, 23 aa, Arabidopsis thaliana
ISQNRLAVKFLSGDFPRVKFGSR

SEQ ID NO: 3685 - DNA, 66 bp, Arabidopsis thaliana
  source 1..66: mol_type = genomic DNA
tgatttcttggtggtatcaagaactcagtgaccgatttcttgaaaaagctaatgagttttagataa

SEQ ID NO: 3686 - protein, 20 aa, Arabidopsis thaliana
FLGGIKNSVTDFLKKLMSFR

SEQ ID NO: 3687 - DNA, 57 bp, Arabidopsis thaliana
  source 1..57: mol_type = genomic DNA
tgattctcagcagcctatacaagttgctatagcttcaaagatatcagatttggttag

SEQ ID NO: 3688 - protein, 17 aa, Arabidopsis thaliana
FSAAYTSCYSFKDIRFG

SEQ ID NO: 3689 - DNA, 93 bp, Arabidopsis thaliana
  source 1..93: mol_type = genomic DNA
tgatctctgaaatggtctcttctctttttttggtcgaatccaatctcaattatgttgttatctttcttccatcaatgggtaatcaaaacatag

SEQ ID NO: 3690 - protein, 29 aa, Arabidopsis thaliana
SLKWSLLFFWSNPISIMLLSFFHQWVIKT

SEQ ID NO: 3691 - DNA, 495 bp, Arabidopsis thaliana
  source 1..495: mol_type = genomic DNA
taatatctctctgcttcctccttagaacttctatttgcttctcttgcattccacttttattcatttgaagtagtgagattgactccagagataaaacaagaaagagcaacaaagcaacagcatgcggtggtggttgtgtctttctgcttatgtttttcgtacagtagtagtcttctgtcgtgtgattctgtaaactgcgatcttacttcagacatagcttttttatgtaatggggtcgtcttttttcttcacattcccttactttgtccgccaaattatttaagacttcgtttggatactctgttttgggagaaggaatcagttggggagaaagtagttatggtttgtcaatcagcgggacagacaagatttcgtacactcaaacacgaacacggtatcacaggaaacattgtagttagagtcattgcatgctttcaacctctccaagattgccaggctgaatatttccgtcaattgttgaagcccgtcacgtag

SEQ ID NO: 3692 - protein, 163 aa, Arabidopsis thaliana
YLSASSLELLFASLAFHFYSFEVVRLTPEIKQERATKQQHAVVVVSFCLCFSYSSSLLSCDSVNCDLTSDIAFLCNGVVFFLHIPLLCPPNYLRLRLDTLFWEKESVGEKVVMVCQSAGQTRFRTLKHEHGITGNIVVRVIACFQPLQDCQAEYFRQLLKPVT

SEQ ID NO: 3693 - DNA, 69 bp, Arabidopsis thaliana
  source 1..69: mol_type = genomic DNA
tagcttttttatgtaatggggtcgtcttttttcttcacattcccttactttgtccgccaaattatttaa

SEQ ID NO: 3694 - protein, 21 aa, Arabidopsis thaliana
LFYVMGSSFFFTFPYFVRQII

SEQ ID NO: 3695 - DNA, 129 bp, Arabidopsis thaliana
  source 1..129: mol_type = genomic DNA
tagttgttgatttgtttagtgttggatgggacaagatcgtgggtttgggtttcctactcagcgcttgtgttccttgtcttccctagctctgtctcatctcgggaagcaagacttgaatttagtatctaa

SEQ ID NO: 3696 - protein, 41 aa, Arabidopsis thaliana
LLICLVLDGTRSWVWVSYSALVFLVFPSSVSSREARLEFSI

SEQ ID NO: 3697 - DNA, 495 bp, Arabidopsis thaliana; identical to SEQ ID NO: 3691
  source 1..495: mol_type = genomic DNA

SEQ ID NO: 3698 - protein, 163 aa, Arabidopsis thaliana; identical to SEQ ID NO: 3692

SEQ ID NO: 3699 - DNA, 207 bp, Arabidopsis thaliana
  source 1..207: mol_type = genomic DNA
tgattcatttcttgctctgcttcttctctcttagttttgttaagaatcttctcttatccattgtgttttttctattttataaatacatatataattttagttgggggagagcttgcctggtgtcgccttcttctctctctaagacttgtgcttaatttacggacatgtgaagatacttcgcttttgcctcatcgaagggcatgttag

SEQ ID NO: 3700 - protein, 67 aa, Arabidopsis thaliana
FISCSASSLLVLLRIFSYPLCFFYFINTYIILVGGELAWCRLLLSLRLVLNLRTCEDTSLLPHRRAC

SEQ ID NO: 3701 - DNA, 123 bp, Arabidopsis thaliana
  source 1..123: mol_type = genomic DNA
taaaaaaagaaaatttctgttctgaaacgccttcgagggagggagggagagaaagggatgtacttgagaacaaaaaccaagagtcttcaaaattcaaaatatcatgcgattggaaagttttaa

SEQ ID NO: 3702 - protein, 39 aa, Arabidopsis thaliana
KKKISVLKRLRGREGEKGMYLRTKTKSLQNSKYHAIGKF

SEQ ID NO: 3703 - DNA, 66 bp, Arabidopsis thaliana
  source 1..66: mol_type = genomic DNA
tgagaacaaaaaccaagagtcttcaaaattcaaaatatcatgcgattggaaagttttaatctttga

SEQ ID NO: 3704 - protein, 20 aa, Arabidopsis thaliana
EQKPRVFKIQNIMRLESFNL

SEQ ID NO: 3705 - DNA, 75 bp, Arabidopsis thaliana
  source 1..75: mol_type = genomic DNA
tgatatttcgacactctctctttcctctctccttgtctctgtaccgcgtcgaaatatgagaaacgaatgatttga

SEQ ID NO: 3706 - protein, 23 aa, Arabidopsis thaliana
YFDTLSFLSPCLCTASKYEKRMI

SEQ ID NO: 3707 - DNA, 75 bp, Arabidopsis thaliana; identical to SEQ ID NO: 3705
  source 1..75: mol_type = genomic DNA

SEQ ID NO: 3708 - protein, 23 aa, Arabidopsis thaliana
YFDTLSFLSPCLCTASKYEKRMI

SEQ ID NO: 3709 - DNA, 210 bp, Arabidopsis thaliana
  source 1..210: mol_type = genomic DNA
taaaaaatccagaatttcctcttgtcttcgtcgatgaccagcgcaaactttgaggatcccccttcttctcatcgtcctctccaaagatgttcttacccaagcttttgttctgacatctccaaggtttcatcatggtcagaactcaacctacatatatctacaaaaccaaatcgagacctccacagtaataccgtctattcaaaaccctag

SEQ ID NO: 3710 - protein, 68 aa, Arabidopsis thaliana
KIQNFLLSSSMTSANFEDPPSSHRPLQRCSYPSFCSDISKVSSWSELNLHISTKPNRDLHSNTVYSKP

SEQ ID NO: 3711 - DNA, 78 bp, Arabidopsis thaliana
  source 1..78: mol_type = genomic DNA
tgacatctccaaggtttcatcatggtcagaactcaacctacatatatctacaaaaccaaatcgagacctccacagtaa

SEQ ID NO: 3712 - protein, 24 aa, Arabidopsis thaliana
HLQGFIMVRTQPTYIYKTKSRPPQ

SEQ ID NO: 3713 - DNA, 90 bp, Arabidopsis thaliana
  source 1..90: mol_type = genomic DNA
taacatcaaatattttcccggaaaaattctctcattttctcgggaaaaatgttgtctctgcgtttacaaaattttcctctaaaaaagtag

SEQ ID NO: 3714 - protein, 28 aa, Arabidopsis thaliana
HQIFSRKNSLIFSGKMLSLRLQNFPLKK

SEQ ID NO: 3715 - DNA, 66 bp, Arabidopsis thaliana
  source 1..66: mol_type = genomic DNA
tgagccggaagcgatttggcttgtgggcacttctcatatctcgccggaatctgcttccatcgttga

SEQ ID NO: 3716 - protein, 20 aa, Arabidopsis thaliana
AGSDLACGHFSYLAGICFHR

SEQ ID NO: 3717 - DNA, 99 bp, Arabidopsis thaliana
  source 1..99: mol_type = genomic DNA
tgaagcctgtcttttgcggaaactttgagtatgatgctcgtgagagtgatcttgagcggcttttcagaaagtacggcaaggttgagagggttgatatga

SEQ ID NO: 3718 - protein, 31 aa, Arabidopsis thaliana
SLSFAETLSMMLVRVILSGFSESTARLRGLI

SEQ ID NO: 3719 - DNA, 81 bp, Arabidopsis thaliana
  source 1..81: mol_type = genomic DNA
taaaaaaataatcgtttctctatgaagaagaagacgacgacggaagaggaagacctagcatcgccgacgatttatttttga

SEQ ID NO: 3720 - protein, 25 aa, Arabidopsis thaliana
KNNRFSMKKKTTTEEEDLASPTIYF

SEQ ID NO: 3721 - DNA, 54 bp, Arabidopsis thaliana
  source 1..54: mol_type = genomic DNA
taaatacgtaatcgattcgagcggtggatagtgaaattacggcggaggagttga

SEQ ID NO: 3722 - protein, 16 aa, Arabidopsis thaliana
IRNRFERWIVKLRRRS

SEQ ID NO: 3723 - DNA, 81 bp, Arabidopsis thaliana; identical to SEQ ID NO: 3719
  source 1..81: mol_type = genomic DNA

SEQ ID NO: 3724 - protein, 25 aa, Arabidopsis thaliana
KNNRFSMKKKTTTEEEDLASPTIYF

SEQ ID NO: 3725 - DNA, 216 bp, Arabidopsis thaliana
  source 1..216: mol_type = genomic DNA
taaatctcaggagaagttagtcgaggtagtctgcttctatgccattttgccgagaaaatgggagaagttaagggatgttggaaattaggacgaatgctttcaaaggataactctgcaaactcctacaacgtctcccttctcttatctcctgttgtttctgtttgggattgtattgtccgtaaaatgaggtatacctacatacctgagtgggtgtag

SEQ ID NO: 3726 - protein, 70 aa, Arabidopsis thaliana
ISGEVSRGSLLLCHFAEKMGEVKGCWKLGRMLSKDNSANSYNVSLLLSPVVSVWDCIVRKMRYTYIPEWV

SEQ ID NO: 3727 - DNA, 63 bp, Arabidopsis thaliana
  source 1..63: mol_type = genomic DNA
tagaaccattctctatggaaatacctccatcacctccgccggagacggcggcctacacattaa

SEQ ID NO: 3728 - protein, 19 aa, Arabidopsis thaliana
NHSLWKYLHHLRRRRRPTH

SEQ ID NO: 3729 - DNA, 105 bp, Arabidopsis thaliana
  source 1..105: mol_type = genomic DNA
taacggagaaatctacgaatacgtatcagaatacgtctacgctcgtatatttctactcattcctctcaccgtaacgttagagaaggtgattcccctccgaaataa

SEQ ID NO: 3730 - protein, 33 aa, Arabidopsis thaliana
RRNLRIRIRIRLRSYISTHSSHRNVREGDSPPK

SEQ ID NO: 3731 - DNA, 105 bp, Arabidopsis thaliana
  source 1..105: mol_type = genomic DNA
taaaactgtctacctccagtactccaacaggcaagagatagtgaacaacaaaacgacagcggatgttgtggggaatgttcttctggtgactatcgaaggcgatga

SEQ ID NO: 3732 - protein, 33 aa, Arabidopsis thaliana
NCLPPVLQQARDSEQQNDSGCCGECSSGDYRRR

SEQ ID NO: 3733 - DNA, 204 bp, Arabidopsis thaliana
  source 1..204: mol_type = genomic DNA
taaaggaatggcgtccctgaaatttccgttggagattctcgccgtcttcgtcatcatctccgtgattcttttgccgattgctcaatctcattcttcttcgccagctcccgcacccaccagcgatggaacatcgatagatcaggggatagcgtatgttctaatgatggtggctttggcgttgacttatttcattcattgacgtga

SEQ ID NO: 3734 - protein, 66 aa, Arabidopsis thaliana
RNGVPEISVGDSRRLRHHLRDSFADCSISFFFASSRTHQRWNIDRSGDSVCSNDGGFGVDLFHSLT

SEQ ID NO: 3735 - DNA, 114 bp, Arabidopsis thaliana
  source 1..114: mol_type = genomic DNA
tgagtagtctcaccaaagtccatttttaaaaaatcaactataccatttttagctattctttggtcttcgtttcgtataattatgcttgggagtggaaagcaagaaaaattctaa

SEQ ID NO: 3736 - protein, 36 aa, Arabidopsis thaliana
VVSPKSIFKKSTIPFLAILWSSFRIIMLGSGKQEKF

SEQ ID NO: 3737 - DNA, 99 bp, Arabidopsis thaliana
  source 1..99: mol_type = genomic DNA
taaaaaatcaactataccatttttagctattctttggtcttcgtttcgtataattatgcttgggagtggaaagcaagaaaaattctaaactttatataa

SEQ ID NO: 3738 - protein, 31 aa, Arabidopsis thaliana
KINYTIFSYSLVFVSYNYAWEWKARKILNFI

SEQ ID NO: 3739 - DNA, 183 bp, Arabidopsis thaliana
  source 1..183: mol_type = genomic DNA
taaaaaatcaactataccatttttagctattctttggtcttcgtttcgtgtaagcattcaatgttttttttcttttatctctttgggaaacgggagtgtggtcttcgtgtgtgtgtccctgtttcattaaccaataattatgcttgggagtggaaagcaagaaaaattctaaactttatataa

SEQ ID NO: 3740 - protein, 59 aa, Arabidopsis thaliana
KINYTIFSYSLVFVSCKHSMFFFFYLFGKRECGLRVCVPVSLTNNYAWEWKARKILNFI

SEQ ID NO: 3741 - DNA, 114 bp, Arabidopsis thaliana
  source 1..114: mol_type = genomic DNA
tagcctatcatgagcaacatccctagatctctcaccgactcagatctttctctatttactctcataatctcttctgctgttgatccttggcctttttctatcaccgttttttag

SEQ ID NO: 3742 - protein, 36 aa, Arabidopsis thaliana
PIMSNIPRSLTDSDLSLFTLIISSAVDPWPFSITVF

SEQ ID NO: 3743 - DNA, 60 bp, Arabidopsis thaliana
  source 1..60: mol_type = genomic DNA
tagctctcacttttgttcgtctcttctgcgtcaaacatttccaccattttcgtttcttaa

SEQ ID NO: 3744 - protein, 18 aa, Arabidopsis thaliana
LSLLFVSSASNISTIFVS

SEQ ID NO: 3745 - DNA, 129 bp, Arabidopsis thaliana
  source 1..129: mol_type = genomic DNA
tgagaccagaagaacttctttcgatcgatttctacagtgattctgtttgctcaagactacaactttgtgtactttctctttcaacgagctgtgtatcgtgtacttcatggtgtgttcctctgcttctga

SEQ ID NO: 3746 - protein, 41 aa, Arabidopsis thaliana
DQKNFFRSISTVILFAQDYNFVYFLFQRAVYRVLHGVFLCF

SEQ ID NO: 3747 - DNA, 96 bp, Arabidopsis thaliana
  source 1..96: mol_type = genomic DNA
tgattctgtttgctcaagactacaactttgtgtactttctctttcaacgagctgtgtatcgtgtacttcatggtgtgttcctctgcttctgattga

SEQ ID NO: 3748 - protein, 30 aa, Arabidopsis thaliana
FCLLKTTTLCTFSFNELCIVYFMVCSSASD

SEQ ID NO: 3749 - DNA, 228 bp, Arabidopsis thaliana
  source 1..228: mol_type = genomic DNA
taagtgagagagaaagagagaaagagagaaaatgaagttcttgttccagtgtccatgttgctcttgcttctgcttcatgaaaccaaagccgggcaaaccaaaagctgttggagatacaaaaccaaaggaggagaagaagaaagaggtgaagaaagaagagatcaagaaagaggagaagaaagaagagaagaaagaagagaagaaggaaaccaaagcagagaaggctga

SEQ ID NO: 3750 - protein, 74 aa, Arabidopsis thaliana
VREKERKRENEVLVPVSMLLLLLLHETKAGQTKSCWRYKTKGGEEERGEERRDQERGEERREERREEGNQSREG

SEQ ID NO: 3751 - DNA, 60 bp, Arabidopsis thaliana
  source 1..60: mol_type = genomic DNA
taattcgaaagagcggtcacgacgtttcttagagaatcgtcttcttcatcttcttcgtga

SEQ ID NO: 3752 - protein, 18 aa, Arabidopsis thaliana
FERAVTTFLRESSSSSSS

SEQ ID NO: 3753 - DNA, 63 bp, Arabidopsis thaliana
  source 1..63: mol_type = genomic DNA
tgagtatctgatgaaatgagaagcaaaagatatggttggaatgattcgaggaggaatgggtga

SEQ ID NO: 3754 - protein, 19 aa, Arabidopsis thaliana
VSDEMRSKRYGWNDSRRNG

SEQ ID NO: 3755 - DNA, 75 bp, Arabidopsis thaliana
  source 1..75: mol_type = genomic DNA
taaatgccaaaggtcctctttttcgtcttcttccactctctctatacttctctcacaaatctgggcatgttttga

SEQ ID NO: 3756 - protein, 23 aa, Arabidopsis thaliana
MPKVLFFVFFHSLYTSLTNLGMF

SEQ ID NO: 3757 - DNA, 144 bp, Arabidopsis thaliana
  source 1..144: mol_type = genomic DNA
tgaaacaacagatttctaaaacaactctttaaaggtcttcttcatcttcgctctctcttcttcttatcctctaaatctcttccccttttcttgctcttaaacgttaccatagtcctaatcagattactgtttccaaagtcttaa

SEQ ID NO: 3758 - protein, 46 aa, Arabidopsis thaliana
NNRFLKQLFKGLLHLRSLFFLSSKSLPLFLLLNVTIVLIRLLFPKS

SEQ ID NO: 3759 - DNA, 84 bp, Arabidopsis thaliana
  source 1..84: mol_type = genomic DNA
taatattttctcaccgtcgagaaaacaaaacacaagttgcagactttatccaaatttagggttttctctttttttcttacttag

SEQ ID NO: 3760 - protein, 26 aa, Arabidopsis thaliana
YFLTVEKTKHKLQTLSKFRVFSFFLT

SEQ ID NO: 3761 - DNA, 186 bp, Arabidopsis thaliana
  source 1..186: mol_type = genomic DNA
taatcggtaatcacggctatttacgggataaagccacggcctttgagctttcatgtccaacgaaagggttgtttaatcataactaatcctttgcctcacggaggacgtggagctctgccgtctgaaggcggcagtccctccgatctcctcttcctcgccggaggcggttccacaaatagccactaa

SEQ ID NO: 3762 - protein, 60 aa, Arabidopsis thaliana
SVITAIYGIKPRPLSFHVQRKGCLIITNPLPHGGRGALPSEGGSPSDLLFLAGGGSTNSH

SEQ ID NO: 3763 - DNA, 57 bp, Arabidopsis thaliana
  source 1..57: mol_type = genomic DNA
tgaaggcggcagtccctccgatctcctcttcctcgccggaggcggttccacaaatag

SEQ ID NO: 3764 - protein, 17 aa, Arabidopsis thaliana
RRQSLRSPLPRRRRFHK

SEQ ID NO: 3765 - DNA, 84 bp, Arabidopsis thaliana
  source 1..84: mol_type = genomic DNA
taatcagaactcattttcttcttcttctccatctccgaaatcgatcgtcgattttgtcttctcgccgctattctaagcttctaa

SEQ ID NO: 3766 - protein, 26 aa, Arabidopsis thaliana
SELIFFFFSISEIDRRFCLLAAILSF

SEQ ID NO: 3767 - DNA, 57 bp, Arabidopsis thaliana
  source 1..57: mol_type = genomic DNA
tgatttaggacaaaagactttgactttgaactggcagtagttagtgtttttatctga

SEQ ID NO: 3768 - protein, 17 aa, Arabidopsis thaliana
FRTKDFDFELAVVSVFI

SEQ ID NO: 3769 - DNA, 150 bp, Arabidopsis thaliana
  source 1..150: mol_type = genomic DNA
taaaaaagtctctcttttctctttttcttcttcgtctcccatattctccgatcaaaaatatatttctctctcactttccttggttttctcggcggcttcttcttctcctatttctccctcaaatcgttttctccagttttcttgggataa

SEQ ID NO: 3770 - protein, 48 aa, Arabidopsis thaliana
KSLSFLFFFFVSHILRSKIYFSLTFLGFLGGFFFSYFSLKSFSPVFLG

SEQ ID NO: 3771 - DNA, 150 bp, Arabidopsis thaliana; identical to SEQ ID NO: 3769
  source 1..150: mol_type = genomic DNA

SEQ ID NO: 3772 - protein, 48 aa, Arabidopsis thaliana; identical to SEQ ID NO: 3770

SEQ ID NO: 3773 - DNA, 135 bp, Arabidopsis thaliana
  source 1..135: mol_type = genomic DNA
tagacccaattctctctctctcttaacaacactctctcctctctctccctctctctatctatccccatttccatggaagcaagcagatgtgttcttacatctctttctctctctacagccttacatgaacagtga

SEQ ID NO: 3774 - protein, 43 aa, Arabidopsis thaliana
TQFSLSLNNTLSSLSLSLSIPISMEASRCVLTSLSLSTALHEQ

SEQ ID NO: 3775 - DNA, 105 bp, Arabidopsis thaliana
  source 1..105: mol_type = genomic DNA
taacaacactctctcctctctctccctctctctatctatccccatttccatggaagcaagcagatgtgttcttacatctctttctctctctacagccttacatga

SEQ ID NO: 3776 - protein, 33 aa, Arabidopsis thaliana
QHSLLSLPLSIYPHFHGSKQMCSYISFSLYSLT

SEQ ID NO: 3777 - DNA, 150 bp, Arabidopsis thaliana
  source 1..150: mol_type = genomic DNA
tagattaggccaaccgttatcttctatatcttcttcttcttcttctctttgattcttcaaaccaaagcattaacaaataaagattcctttttgttatggtttgatttattggtcgccatctctcgcccaacttcaccttctctgacataa

SEQ ID NO: 3778 - protein, 48 aa, Arabidopsis thaliana
IRPTVIFYIFFFFFSLILQTKALTNKDSFLLWFDLLVAISRPTSPSLT

SEQ ID NO: 3779 - DNA, 75 bp, Arabidopsis thaliana
  source 1..75: mol_type = genomic DNA
taacaaataaagattcctttttgttatggtttgatttattggtcgccatctctcgcccaacttcaccttctctga

SEQ ID NO: 3780 - protein, 23 aa, Arabidopsis thaliana
QIKIPFCYGLIYWSPSLAQLHLL

SEQ ID NO: 3781 - DNA, 165 bp, Arabidopsis thaliana
  source 1..165: mol_type = genomic DNA
taaagatctggtgttatgcagaagagcagggacgacaaggttgataaaagtgaagaagtgaatagtagtaacagtggaagaagaatcaaatgttcttatcatccactgatcaaagaagcccttctaataacaatccatcatcttcttctagtttcttacatctga

SEQ ID NO: 3782 - protein, 53 aa, Arabidopsis thaliana
RSGVMQKSRDDKVDKSEEVNSSNSGRRIKCSYHPLIKEALLITIHHLLLVSYI

SEQ ID NO: 3783 - DNA, 123 bp, Arabidopsis thaliana
  source 1..123: mol_type = genomic DNA
tagctgaaaatccaaaaatcggacttacttcatcagctttttggccccactttacaaagtatgagcaagtttttcttgttttctacagcaaagcaatgctcacaccattttcgtggagcttaa

SEQ ID NO: 3784 - protein, 39 aa, Arabidopsis thaliana
LKIQKSDLLHQLFGPTLQSMSKFFLFSTAKQCSHHFRGA

SEQ ID NO: 3785 - DNA, 156 bp, Arabidopsis thaliana
  source 1..156: mol_type = genomic DNA
taagaggaagtgggaagttcagtctccatggtttgtctgttgcttacttatctggtagacaatcatctgagagtcaatttgggaaatatagtcaagatgatgttgatgctcttcgtgcacttgctgaggaacctggaggagttgatttgttcttaa

SEQ ID NO: 3786 - protein, 50 aa, Arabidopsis thaliana
EEVGSSVSMVCLLLTYLVDNHLRVNLGNIVKMMLMLFVHLLRNLEELICS

SEQ ID NO: 3787 - DNA, 168 bp, Arabidopsis thaliana
  source 1..168: mol_type = genomic DNA
taaccttttttaatttttatcctcgttttttcaattcgcgtgaagagacagagagagagaaagataaagctagaagagaatcgacattacgaatcttttgttccagatcgtgagagaggaggagttggaagaatgaagatgactattgggtctttgttccaaccctaa

SEQ ID NO: 3788 - protein, 54 aa, Arabidopsis thaliana
PFLIFILVFSIRVKRQRERKIKLEENRHYESFVPDRERGGVGRMKMTIGSLFQP

SEQ ID NO: 3789 - DNA, 129 bp, Arabidopsis thaliana
  source 1..129: mol_type = genomic DNA
tgagtcatgagtttcttgtcttcatcttcatctaataaagttaacaacactctcatcaatttttattatgttcaaatctgtctgacttttcgttcttttctcttacacccaagcgttttaacaatctaa

SEQ ID NO: 3790 - protein, 41 aa, Arabidopsis thaliana
VMSFLSSSSSNKVNNTLINFYYVQICLTFRSFLLHPSVLTI

SEQ ID NO: 3791 - DNA, 78 bp, Arabidopsis thaliana
  source 1..78: mol_type = genomic DNA
tgagtttcttgtcttcatcttcatctaataaagttaacaacactctcatcaatttttattatgttcaaatctgtctga

SEQ ID NO: 3792 - protein, 24 aa, Arabidopsis thaliana
VSCLHLHLIKLTTLSSIFIMFKSV

SEQ ID NO: 3793 - DNA, 66 bp, Arabidopsis thaliana
  source 1..66: mol_type = genomic DNA
taaaccaaaaaaaaaaaaaacgctcttcactatttatttactaaactctcctttgtttgttactaa

SEQ ID NO: 3794 - protein, 20 aa, Arabidopsis thaliana
TKKKKNALHYLFTKLSFVCY

SEQ ID NO: 3795 - DNA, 105 bp, Arabidopsis thaliana
  source 1..105: mol_type = genomic DNA
taaaacctcactcgttggccaattcttttggttttcatacacataaatctcagattccaaatgggttttcttagctctttctttcaaatgatgaacatttgttag

SEQ ID NO: 3796 - protein, 33 aa, Arabidopsis thaliana
NLTRWPILLVFIHINLRFQMGFLSSFFQMMNIC

SEQ ID NO: 3797 - DNA, 105 bp, Arabidopsis thaliana; identical to SEQ ID NO: 3795
  source 1..105: mol_type = genomic DNA

SEQ ID NO: 3798 - protein, 33 aa, Arabidopsis thaliana; identical to SEQ ID NO: 3796

SEQ ID NO: 3799 - DNA, 66 bp, Arabidopsis thaliana; identical to SEQ ID NO: 3793
  source 1..66: mol_type = genomic DNA

SEQ ID NO: 3800 - protein, 20 aa, Arabidopsis thaliana
TKKKKNALHYLFTKLSFVCY

SEQ ID NO: 3801 - DNA, 105 bp, Arabidopsis thaliana; identical to SEQ ID NO: 3795
  source 1..105: mol_type = genomic DNA

SEQ ID NO: 3802 - protein, 33 aa, Arabidopsis thaliana; identical to SEQ ID NO: 3796

SEQ ID NO: 3803 - DNA, 411 bp, Arabidopsis thaliana
  source 1..411: mol_type = genomic DNA
tgaagaaagaagaagagatgggagttttctcattcgtgtgcaaaagcaaaggcggagaatggaccgcaaagcaacacgaaggagatcttgaagcttcagcttcttccacctacgatctccagcgcaagcttgttcagactgctctctccgccgattcatctggcggcgttcagtcttctttctctcttgtctctcctacctccgccgtcttcgtggtggtcattggtggtggtggtggtggaggatttgctgccggaggaggtgcagctgctggaggtggtggtggtggtgaggctgccgcagccacaaaggaggaagagaagaagaaggaagaatctgaagaggaagagggagactttggatttgatctctttggttaagagacctaaaacaactttgttagtgttctga

SEQ ID NO: 3804 - protein, 135 aa, Arabidopsis thaliana
RKKKRWEFSHSCAKAKAENGPQSNTKEILKLQLLPPTISSASLFRLLSPPIHLAAFSLLSLLSLLPPPSSWWSLVVVVVEDLLPEEVQLLEVVVVVRLPQPQRRKRRRRKNLKRKRETLDLISLVKRPKTTLLVF

SEQ ID NO: 3805 - DNA, 327 bp, Arabidopsis thaliana
  source 1..327: mol_type = genomic DNA
tgaagaaagaagaagagatgggagttttctcattcgtgtgcaaaagcaaaggcggagaatggaccgcaaagcaacacgaaggagatcttgaagcttcagcttcttccacctacgatctccagcgcaagcttgttcagactgctctctccgccgattcatctggcggcgttcagtcttctttctctcttgtctctcctacctccgccgtcttcgtggtggtcattggtggtggtggtggtggaggatttgctgccggaggaggaagagaagaagaaggaagaatctgaagaggaagagggagactttggatttgatctctttggttaa

SEQ ID NO: 3806 - protein, 107 aa, Arabidopsis thaliana
RKKKRWEFSHSCAKAKAENGPQSNTKEILKLQLLPPTISSASLFRLLSPPIHLAAFSLLSLLSLLPPPSSWWSLVVVVVEDLLPEEEEKKKEESEEEEGDFGFDLFG

SEQ ID NO: 3807 - DNA, 408 bp, Arabidopsis thaliana
  source 1..408: mol_type = genomic DNA
tgaagaaagaagaagagatgggagttttctcattcgtgtgcaaaagcaaaggcggagaatggaccgcaaagcaacacgaaggagatcttgaagcttcagcttcttccacctacgatctccagcgcaagcttgttcagactgctctctccgccgattcatctggcggcgttcagtcttctttctctcttgtctctcctacctccgccgtcttcgtggtcattggtggtggtggtggtggaggatttgctgccggaggaggtgcagctgctggaggtggtggtggtggtgaggctgccgcagccacaaaggaggaagagaagaagaaggaagaatctgaagaggaagagggagactttggatttgatctctttggttaagagacctaaaacaactttgttagtgttctga

SEQ ID NO: 3808 - protein, 134 aa, Arabidopsis thaliana
RKKKRWEFSHSCAKAKAENGPQSNTKEILKLQLLPPTISSASLFRLLSPPIHLAAFSLLSLLSLLPPPSSWSLVVVVVEDLLPEEVQLLEVVVVVRLPQPQRRKRRRRKNLKRKRETLDLISLVKRPKTTLLVF

SEQ ID NO: 3809 - DNA, 75 bp, Arabidopsis thaliana
  source 1..75: mol_type = genomic DNA
tgatcaatgagcttctttggagaaaatcacagcttgaccactcttcttttcaggcatgggaacaaagatcgttga

SEQ ID NO: 3810 - protein, 23 aa, Arabidopsis thaliana
SMSFFGENHSLTTLLFRHGNKDR

SEQ ID NO: 3811 - DNA, 153 bp, Arabidopsis thaliana
  source 1..153: mol_type = genomic DNA
tgatttcaattctctatcttattgacacataaacatggaccggtccactttcatcttatctctactcttcacactcactgtctcgactacgaccctcttctctccggttttcgcaggaacgttcgacacagaattcgatatcacttggggtga

SEQ ID NO: 3812 - protein, 49 aa, Arabidopsis thaliana
FQFSILLTHKHGPVHFHLISTLHTHCLDYDPLLSGFRRNVRHRIRYHLG

SEQ ID NO: 3813 - DNA, 99 bp, Arabidopsis thaliana
  source 1..99: mol_type = genomic DNA
tagatcgatctccaatcatcacatatcgctacacccacatcattcaatcatagctctcgtatctccaatcatcttttcattcacctaatcttacaataa

SEQ ID NO: 3814 - protein, 31 aa, Arabidopsis thaliana
IDLQSSHIATPTSFNHSSRISNHLFIHLILQ

SEQ ID NO: 3815 - DNA, 132 bp, Arabidopsis thaliana
  source 1..132: mol_type = genomic DNA
tagataagtgctaatgcttttgtgagaatggagaatcatttcaactgttattgtcagcaaaccactgccaagttatattgtcatcgtgggtttgagatttggtgcgaaactgagaaagacttatcttggtga

SEQ ID NO: 3816 - protein, 42 aa, Arabidopsis thaliana
ISANAFVRMENHFNCYCQQTTAKLYCHRGFEIWCETEKDLSW

SEQ ID NO: 3817 - DNA, 105 bp, Arabidopsis thaliana
  source 1..105: mol_type = genomic DNA
tgagagacaatggtgacgcgtgtgaccagacggcgtttaaacccttttaccaaaatctcatctttcttcttctccgtcgtcgtcatcgtaatatctttaatctga

SEQ ID NO: 3818 - protein, 33 aa, Arabidopsis thaliana
ETMVTRVTRRRLNPFTKISSFFFSVVVIVISLI

SEQ ID NO: 3819 - DNA, 207 bp, Arabidopsis thaliana
  source 1..207: mol_type = genomic DNA
taatgtttattatatcttctctttatctctcactcgctttctttcatcttgttgatatgtctttatctttttcttctcctgttaaagcatggcttctggaacctagatgaagatcgaaaggctctacgagttctccagccggatttggtgctcttcacaggcagcttctctgttactgacgtcaaattgatttccttttttttttga

SEQ ID NO: 3820 - protein, 67 aa, Arabidopsis thaliana
CLLYLLFISHSLSFILLICLYLFLLLLKHGFWNLDEDRKALRVLQPDLVLFTGSFSVTDVKLISFFF

SEQ ID NO: 3821 - DNA, 87 bp, Arabidopsis thaliana
  source 1..87: mol_type = genomic DNA
tagatgaagatcgaaaggctctacgagttctccagccggatttggtgctcttcacaggcagcttctctgttactgacgtcaaattga

SEQ ID NO: 3822 - protein, 27 aa, Arabidopsis thaliana
MKIERLYEFSSRIWCSSQAASLLLTSN

SEQ ID NO: 3823 - DNA, 72 bp, Arabidopsis thaliana
  source 1..72: mol_type = genomic DNA
tgaagatcgaaaggctctacgagttctccagccggatttggtgctcttcacaggcagcttctctgttactga

SEQ ID NO: 3824 - protein, 22 aa, Arabidopsis thaliana
RSKGSTSSPAGFGALHRQLLCY

SEQ ID NO: 3825 - DNA, 141 bp, Arabidopsis thaliana
  source 1..141: mol_type = genomic DNA
taagactgttttcgtcagcaactaaaccctggtatccatttcttccaattatccaagcttcccctcaaaggtttcactttttcgccattgcttcaaccaaatttattcgtgttaaacggaatcgatgctgttgtgtggtga

SEQ ID NO: 3826 - protein, 45 aa, Arabidopsis thaliana
DCFRQQLNPGIHFFQLSKLPLKGFTFSPLLQPNLFVLNGIDAVVW

SEQ ID NO: 3827 - DNA, 264 bp, Arabidopsis thaliana
  source 1..264: mol_type = genomic DNA
tgaaaattggtcgttgggtttacgataattaaacaaaggttgaaagagcatcaaccgttgattagtcttcttaatcctcaacgacgaattcaactgctcctccaatattctcttccttcttccttctttcggaaacaaccacagaagcaaagaaatcaatctcctatgagttccaagagacggcggagattcaatctccgaacagtgttctccatcatcttcctcacctttcttcctctgaatcttaactctcaaggtagttga

SEQ ID NO: 3828 - protein, 86 aa, Arabidopsis thaliana
KLVVGFTIIKQRLKEHQPLISLLNPQRRIQLLLQYSLPSSFFRKQPQKQRNQSPMSSKRRRRFNLRTVFSIIFLTFLPLNLNSQGS

SEQ ID NO: 3829 - DNA, 69 bp, Arabidopsis thaliana
  source 1..69: mol_type = genomic DNA
tagtgtagtgttgacaacgccactcttgactctctttctcttcttcttctcgagatcctgaaaatgtga

SEQ ID NO: 3830 - protein, 21 aa, Arabidopsis thaliana
CSVDNATLDSLSLLLLEILKM

SEQ ID NO: 3831 - DNA, 60 bp, Arabidopsis thaliana
  source 1..60: mol_type = genomic DNA
tgactactggtactctgttcaattcaatcgagatcctccgagattcgctctcaaatctga

SEQ ID NO: 3832 - protein, 18 aa, Arabidopsis thaliana
LLVLCSIQSRSSEIRSQI

SEQ ID NO: 3833 - DNA, 60 bp, Arabidopsis thaliana
  source 1..60: mol_type = genomic DNA
taagctctctctctgttggtggccgacccatctcaaatcaactcacaacgaagcttctga

SEQ ID NO: 3834 - protein, 18 aa, Arabidopsis thaliana
ALSLLVADPSQINSQRSF

SEQ ID NO: 3835 - DNA, 123 bp, Arabidopsis thaliana
  source 1..123: mol_type = genomic DNA
tagattgaagaatggcggacggtgaagacattcaaccgcttgtttgtgacaatggaactggaatggttaaggccggattcgcgggtgacgatgcaccaagagcggtttttccgagcattgtag

SEQ ID NO: 3836 - protein, 39 aa, Arabidopsis thaliana
IEEWRTVKTFNRLFVTMELEWLRPDSRVTMHQERFFRAL

SEQ ID NO: 3837 - DNA, 66 bp, Arabidopsis thaliana
  source 1..66: mol_type = genomic DNA
taggagattgtttttgcttgtggtgagagaagatcgcatcgtgtgggtagcgtttcaaacaagtaa

SEQ ID NO: 3838 - protein, 20 aa, Arabidopsis thaliana
EIVFACGERRSHRVGSVSNK

SEQ ID NO: 3839 - DNA, 213 bp, Arabidopsis thaliana
  source 1..213: mol_type = genomic DNA
taaaattttctattgcagagagaaagagagttagagaaagagagagagagagagagagagagagagatgaaacttgtgcaagaagaataccgtaaaggaccgtggacagaacaggaggacatcctcttggtcaactttgtccacttgttcggagatcgaagatgggattttgtagcgaaagtttcaggtttgaaggtggagggagaaacataa

SEQ ID NO: 3840 - protein, 69 aa, Arabidopsis thaliana
NFLLQRERELEKEREREREREMKLVQEEYRKGPWTEQEDILLVNFVHLFGDRRWDFVAKVSGLKVEGET

SEQ ID NO: 3841 - DNA, 213 bp, Arabidopsis thaliana; identical to SEQ ID NO: 3839
  source 1..213: mol_type = genomic DNA

SEQ ID NO: 3842 - protein, 69 aa, Arabidopsis thaliana; identical to SEQ ID NO: 3840

SEQ ID NO: 3843 - DNA, 78 bp, Arabidopsis thaliana
  source 1..78: mol_type = genomic DNA
tagactgacgtgataaccaactacaccacgaaacctacatgcttctttctaacctcaacaatatatatatacatatag

SEQ ID NO: 3844 - protein, 24 aa, Arabidopsis thaliana
TDVITNYTTKPTCFFLTSTIYIYI

SEQ ID NO: 3845 - DNA, 114 bp, Arabidopsis thaliana
  source 1..114: mol_type = genomic DNA
tgattctcccacagtttcatttcttcttgtgtggggaaatctgcatctttgtccactctcttttattttcccaagaaaggaaacaaattcccacaatttcttgtcttctcttaa

SEQ ID NO: 3846 - protein, 36 aa, Arabidopsis thaliana
FSHSFISSCVGKSASLSTLFYFPKKGNKFPQFLVFS

SEQ ID NO: 3847 - DNA, 132 bp, Arabidopsis thaliana
  source 1..132: mol_type = genomic DNA
tgaaaaagaataagtttggggaaagaagaaatgtgcaagtgttatgtcagtgtagaggggaagtttctgcagaatcttagctgttacttgatgctgcttctattctatcttgttcatggaggctggtcttga

SEQ ID NO: 3848 - protein, 42 aa, Arabidopsis thaliana
KRISLGKEEMCKCYVSVEGKFLQNLSCYLMLLLFYLVHGGWS

SEQ ID NO: 3849 - DNA, 66 bp, Arabidopsis thaliana
  source 1..66: mol_type = genomic DNA
tagctgttacttgatgctgcttctattctatcttgttcatggaggctggtcttgacactttcatga

SEQ ID NO: 3850 - protein, 20 aa, Arabidopsis thaliana
LLLDAASILSCSWRLVLTLS

SEQ ID NO: 3851 - DNA, 63 bp, Arabidopsis thaliana
  source 1..63: mol_type = genomic DNA
tgatgctgcttctattctatcttgttcatggaggctggtcttgacactttcatgagatattag

SEQ ID NO: 3852 - protein, 19 aa, Arabidopsis thaliana
CCFYSILFMEAGLDTFMRY

SEQ ID NO: 3853 - DNA, 225 bp, Arabidopsis thaliana
  source 1..225: mol_type = genomic DNA
taaattgttttttttttgctctttaaaaagtatatttttttccaatctgcaaattttagtctatgtctgttccttgtgctccctcttctcagtacctgcaaatggaggaagaagaatccttctctgaaacccttgttctcatttgattcctccttcctctctcttcttctctctctgtctctgattcgttattccacacttatgactcatctttcccgtcaatag

SEQ ID NO: 3854 - protein, 73 aa, Arabidopsis thaliana
IVFFLLFKKYIFFQSANFSLCLFLVLPLLSTCKWRKKNPSLKPLFSFDSSFLSLLLSLSLIRYSTLMTHLSRQ

SEQ ID NO: 3855 - DNA, 102 bp, Arabidopsis thaliana
  source 1..102: mol_type = genomic DNA
tagacatgtcgtgtttcgattgcagtggttatgatgtctcaagttgtcttattcatctcgctgaatggcatcctttggaatagtcaagttctccgggcttga

SEQ ID NO: 3856 - protein, 32 aa, Arabidopsis thaliana
TCRVSIAVVMMSQVVLFISLNGILWNSQVLRA

SEQ ID NO: 3857 - DNA, 108 bp, Arabidopsis thaliana
  source 1..108: mol_type = genomic DNA
taacttatttataaggtttcagtcttagacatgtcgtgtttcgattgcagtggttatgatgtctcaagttgtcttattcatctcgctgaatggcatcctttggaatag

SEQ ID NO: 3858 - protein, 34 aa, Arabidopsis thaliana
LIYKVSVLDMSCFDCSGYDVSSCLIHLAEWHPLE

SEQ ID NO: 3859 - DNA, 102 bp, Arabidopsis thaliana; identical to SEQ ID NO: 3855
  source 1..102: mol_type = genomic DNA

SEQ ID NO: 3860 - protein, 32 aa, Arabidopsis thaliana; identical to SEQ ID NO: 3856

SEQ ID NO: 3861 - DNA, 123 bp, Arabidopsis thaliana
  source 1..123: mol_type = genomic DNA
tgattgattgaagattcgatggataagataataaagagatggagattgttttggagcaacggtcgaaatcagtgtccagatactgggacaagagttgcccaattaagaaagacttgtctttga

SEQ ID NO: 3862 - protein, 39 aa, Arabidopsis thaliana
LIEDSMDKIIKRWRLFWSNGRNQCPDTGTRVAQLRKTCL

SEQ ID NO: 3863 - DNA, 75 bp, Arabidopsis thaliana
  source 1..75: mol_type = genomic DNA
taaagagatggagattgttttggagcaacggtcgaaatcagtgtccagatactgggacaagagttgcccaattaa

SEQ ID NO: 3864 - protein, 23 aa, Arabidopsis thaliana
RDGDCFGATVEISVQILGQELPN

SEQ ID NO: 3865 - DNA, 243 bp, Arabidopsis thaliana
  source 1..243: mol_type = genomic DNA
taaagagacaacaaacacctctctatctctctctttcttttttctttcttccgtttcaaagtttcttccttttgggcgggttttaaggaaattttggaatttctctctttttggagacgtttctttaatttctgggcttcttctagttgtgggttttgttttctacttgtagctactgtgtcacgcttttctctagcgaatactttgatgcttcttcatgactctttaacaagattattctga

SEQ ID NO: 3866 - protein, 79 aa, Arabidopsis thaliana
RDNKHLSISLFLFSFFRFKVSSFWAGFKEILEFLSFWRRFFNFWASSSCGFCFLLVATVSRFSLANTLMLLHDSLTRLF

SEQ ID NO: 3867 - DNA, 129 bp, Arabidopsis thaliana
  source 1..129: mol_type = genomic DNA
taattgccctttagtgttgttcgttcagagtcttcaaaacttttgcagcttcaattgtacctgggtttcttcttcattgttcctaaggtttctgtgtccttcaattcttctgatataatgcttctttaa

SEQ ID NO: 3868 - protein, 41 aa, Arabidopsis thaliana
LPFSVVRSESSKLLQLQLYLGFFFIVPKVSVSFNSSDIMLL

SEQ ID NO: 3869 - DNA, 51 bp, Arabidopsis thaliana
  source 1..51: mol_type = genomic DNA
taattagggttttcgatttctctgatgaaactgagaagaatctctcattag

SEQ ID NO: 3870 - protein, 15 aa, Arabidopsis thaliana
LGFSISLMKLRRISH

SEQ ID NO: 3871 - DNA, 117 bp, Arabidopsis thaliana
  source 1..117: mol_type = genomic DNA
taaactcaatatataatgataacacgttcacgtgttcatcgtcaaaagagtgtctcagtgagtacaatcttcaggtgtcttctagttttgatcagacgctctattcaattctcttaa

SEQ ID NO: 3872 - protein, 37 aa, Arabidopsis thaliana
TQYIMITRSRVHRQKSVSVSTIFRCLLVLIRRSIQFS

SEQ ID NO: 3873 - DNA, 327 bp, Arabidopsis thaliana
  source 1..327: mol_type = genomic DNA
tagggttataaggtgataaagaaaatggggaatagtggagatttggagcaggctctgcaagatgggaatatctttagacagctcaatgctcttattgtagctcatctccgtcatcacaatctctcacaagttgcaagtgcggttgcttcagcaacaatgacaccattgaatattgaggttcctccaaaccgtcttttggagcttgttgcaaagggtcttgcagcggagaacaatgggacattgagaggtgtttcttcatcagtcttgttaccttcttcttatggatcaatcactactcctcgaacagcttctatcgactttaggtga

SEQ ID NO: 3874 - protein, 107 aa, Arabidopsis thaliana
GYKVIKKMGNSGDLEQALQDGNIFRQLNALIVAHLRHHNLSQVASAVASATMTPLNIEVPPNRLLELVAKGLAAENNGTLRGVSSSVLLPSSYGSITTPRTASIDFR

SEQ ID NO: 3875 - DNA, 150 bp, Arabidopsis thaliana
  source 1..150: mol_type = genomic DNA
tgaggttcctccaaaccgtcttttggagcttgttgcaaagggtcttgcagcggagaacaatgggacattgagaggtgtttcttcatcagtcttgttaccttcttcttatggatcaatcactactcctcgaacagcttctatcgactttag

SEQ ID NO: 3876 - protein, 48 aa, Arabidopsis thaliana
GSSKPSFGACCKGSCSGEQWDIERCFFISLVTFFLWINHYSSNSFYRL

SEQ ID NO: 3877 - DNA, 114 bp, Arabidopsis thaliana
  source 1..114: mol_type = genomic DNA
tgattttttaccataagtatgtcaactggattaagcttaagtagtaatggtttttactatgttcatgtggggatttctcttcctctctgtttacttcattccgagatgacttga

SEQ ID NO: 3878 - protein, 36 aa, Arabidopsis thaliana
FFTISMSTGLSLSSNGFYYVHVGISLPLCLLHSEMT

SEQ ID NO: 3879 - DNA, 153 bp, Arabidopsis thaliana
  source 1..153: mol_type = genomic DNA
taaaatgtttctgtgaaatcaaataacatatcactttctaataaacatcaaaatttctccttttttacagaaacaagaagtttttttgggaaagccgttgacttgactttttctttggggtgttgtgtgggagcttatagtatggtaccataa

SEQ ID NO: 3880 - protein, 49 aa, Arabidopsis thaliana
NVSVKSNNISLSNKHQNFSFFTETRSFFGKAVDLTFSLGCCVGAYSMVP

SEQ ID NO: 3881 - DNA, 72 bp, Arabidopsis thaliana
  source 1..72: mol_type = genomic DNA
taagtagtaatggtttttactatgttcatgtggggatttctcttcctctctgtttacttcattccgagatga

SEQ ID NO: 3882 - protein, 22 aa, Arabidopsis thaliana
VVMVFTMFMWGFLFLSVYFIPR

SEQ ID NO: 3883 - DNA, 111 bp, Arabidopsis thaliana
  source 1..111: mol_type = genomic DNA
taatggtttttactatgttcatgtggggatttctcttcctctctgtttacttcattccgagatgacttgagattttttcaaagtatagttcttggagttaagcttacctag

SEQ ID NO: 3884 - protein, 35 aa, Arabidopsis thaliana
WFLLCSCGDFSSSLFTSFRDDLRFFQSIVLGVKLT

SEQ ID NO: 3885 - DNA, 114 bp, Arabidopsis thaliana; identical to SEQ ID NO: 3877
  source 1..114: mol_type = genomic DNA

SEQ ID NO: 3886 - protein, 36 aa, Arabidopsis thaliana; identical to SEQ ID NO: 3878

SEQ ID NO: 3887 - DNA, 72 bp, Arabidopsis thaliana; identical to SEQ ID NO: 3881
  source 1..72: mol_type = genomic DNA

SEQ ID NO: 3888 - protein, 22 aa, Arabidopsis thaliana
VVMVFTMFMWGFLFLSVYFIPR

SEQ ID NO: 3889 - DNA, 111 bp, Arabidopsis thaliana; identical to SEQ ID NO: 3883
  source 1..111: mol_type = genomic DNA

SEQ ID NO: 3890 - protein, 35 aa, Arabidopsis thaliana; identical to SEQ ID NO: 3884

SEQ ID NO: 3891 - DNA, 150 bp, Arabidopsis thaliana
  source 1..150: mol_type = genomic DNA
tagggttatatttcttacaaactgatgctcattttctcttccctgtctatggctttatctgtgatccttcaaaagcttagtgtcttcggccctggtttgaatccttctttcccttactgcatcgccaatcactcctttgcctcccgttaa

SEQ ID NO: 3892 - protein, 48 aa, Arabidopsis thaliana
GYISYKLMLIFSSLSMALSVILQKLSVFGPGLNPSFPYCIANHSFASR

SEQ ID NO: 3893 - DNA, 57 bp, Arabidopsis thaliana
  source 1..57: mol_type = genomic DNA
tgaatccttctttcccttactgcatcgccaatcactcctttgcctcccgttaattga

SEQ ID NO: 3894 - protein, 17 aa, Arabidopsis thaliana
ILLSLTASPITPLPPVN

SEQ ID NO: 3895 - DNA, 72 bp, Arabidopsis thaliana
  source 1..72: mol_type = genomic DNA
taaattaggcgactttgtagggacactgtaccgaaaaaccctagttctgatttggccatggaagtatcatag

SEQ ID NO: 3896 - protein, 22 aa, Arabidopsis thaliana
IRRLCRDTVPKNPSSDLAMEVS

SEQ ID NO: 3897 - DNA, 141 bp, Arabidopsis thaliana
  source 1..141: mol_type = genomic DNA
taaaatctactctgcgttaaaaaaatgaaaacacgtagcagcagtgtgggtaagatcaaagggtgtttctcgatcagtttcatattcagatgtatcagagttctcattaacagatctgtttctttttccttatctgattaa

SEQ ID NO: 3898 - protein, 45 aa, Arabidopsis thaliana
NLLCVKKMKTRSSSVGKIKGCFSISFIFRCIRVLINRSVSFSLSD

SEQ ID NO: 3899 - DNA, 54 bp, Arabidopsis thaliana
  source 1..54: mol_type = genomic DNA
tgatgctttagtcatggatggggtaacaaatcatcagtaccctccgttttataa

SEQ ID NO: 3900 - protein, 16 aa, Arabidopsis thaliana
CFSHGWGNKSSVPSVL

SEQ ID NO: 3901 - DNA, 54 bp, Arabidopsis thaliana; identical to SEQ ID NO: 3899
  source 1..54: mol_type = genomic DNA

SEQ ID NO: 3902 - protein, 16 aa, Arabidopsis thaliana
CFSHGWGNKSSVPSVL

SEQ ID NO: 3903 - DNA, 57 bp, Arabidopsis thaliana
  source 1..57: mol_type = genomic DNA
taaagtttcaattattcatacactttttcttattccattttgtattctcacacctaa

SEQ ID NO: 3904 - protein, 17 aa, Arabidopsis thaliana
SFNYSYTFSYSILYSHT

SEQ ID NO: 3905 - DNA, 300 bp, Arabidopsis thaliana
  source 1..300: mol_type = genomic DNA
taaccgcaaaaaccaaaaaaaccccccaaaaaaataaaaatctctctctcctctccgtttctctctctgtcggagggagtgccggaatcgcgcgtcgacgggaagaatatcgccggaaaagctcaaaaatcatcgccggtcgcacgaattattcgttggaaacaacgcgtcgtgagaggaggggaaattcgaaaagagaaagaaaaaaaattgaaaacgccgattcactttttttatatatataatataaaaaatttcttttacggaattaaatattctgtgatggatgcgattggatag

SEQ ID NO: 3906 - protein, 98 aa, Arabidopsis thaliana
PQKPKKPPKKIKISLSSPFLSLSEGVPESRVDGKNIAGKAQKSSPVARIIRWKQRVVRGGEIRKEKEKKLKTPIHFFYIYNIKNFFYGIKYSVMDAIG

SEQ ID NO: 3907 - DNA, 87 bp, Arabidopsis thaliana
  source 1..87: mol_type = genomic DNA
taattatcttcctcttcttctgtttcaattcagctgggtttagttttaatttctagttgtgatctctcagcttttgttctatattga

SEQ ID NO: 3908 - protein, 27 aa, Arabidopsis thaliana
LSSSSSVSIQLGLVLISSCDLSAFVLY

SEQ ID NO: 3909 - DNA, 213 bp, Arabidopsis thaliana
  source 1..213: mol_type = genomic DNA
tagaaatttccctacgagaaagcttcttccttttgtctttttgcttctcctttcttcttctcttctatttcttctctctactctctactttcttctgtttttggtaatcggatggcgcgaaatctgccatgggttctgcttattattgtggtatcgtgtcttgtttcaacacttgaagctagtgaaggagattctgattctctttacaagtaa

SEQ ID NO: 3910 - protein, 69 aa, Arabidopsis thaliana
KFPYEKASSFCLFASPFFFSSISSLYSLLSSVFGNRMARNLPWVLLIIVVSCLVSTLEASEGDSDSLYK

SEQ ID NO: 3911 - DNA, 72 bp, Arabidopsis thaliana
  source 1..72: mol_type = genomic DNA
taatcggatggcgcgaaatctgccatgggttctgcttattattgtggtatcgtgtcttgtttcaacacttga

SEQ ID NO: 3912 - protein, 22 aa, Arabidopsis thaliana
SDGAKSAMGSAYYCGIVSCFNT

SEQ ID NO: 3913 - DNA, 51 bp, Arabidopsis thaliana
  source 1..51: mol_type = genomic DNA
tgacgcgtttctgttcatcttacgattttacacgtctctctaaagatttaa

SEQ ID NO: 3914 - protein, 15 aa, Arabidopsis thaliana
RVSVHLTILHVSLKI

SEQ ID NO: 3915 - DNA, 63 bp, Arabidopsis thaliana
  source 1..63: mol_type = genomic DNA
tgaagaacggtaaacggaaaatatgaagacgacgaagggaggcaaagtgatgaaccctactga

SEQ ID NO: 3916 - protein, 19 aa, Arabidopsis thaliana
RTVNGKYEDDEGRQSDEPY

SEQ ID NO: 3917 - DNA, 483 bp, Arabidopsis thaliana
  source 1..483: mol_type = genomic DNA
tagggttcatctgaaaactcttgcaatatttacaagctattaaatcatcaacaatggataataattaccagaactatcatcatcatcataatcataatcatcaacaacaatggcgtccagcaccaacacagccaaacatatgcccgatttgtacagtgcctcacttccctttttgcccaccgtatcctcctccatcttctttcgcttacaaccccaactttcctcctcctcctcacctcaattcacctcgtcctggattcgattccttcaccggaccaccggttcgaccaccgcaaaatcactatcctccgtggcaacctcaccacggaaatcaatggcgaccagttgccgttgatgttgatagggaagctgatcggagctataagagagctcggattgatacgatcgcaggtggttctccgggttacggtgtttctgagagtccgagtcctcggatctcttgggaaaatgaacgaaggttga

SEQ ID NO: 3918 - protein, 159 aa, Arabidopsis thaliana
GSSENSCNIYKLLNHQQWIIITRTIIIIIIIIINNNGVQHQHSQTYARFVQCLTSLFAHRILLHLLSLTTPTFLLLLTSIHLVLDSIPSPDHRFDHRKITILRGNLTTEINGDQLPLMLIGKLIGAIRELGLIRSQVVLRVTVFLRVRVLGSLGKMNEG

SEQ ID NO: 3919 - DNA, 105 bp, Arabidopsis thaliana
  source 1..105: mol_type = genomic DNA
tgagacatcatcatgtctagcgcagaggatgtgaaagagcaaggaaacctcaccaacgaggcagagaagtcaatgccatcatcacagcaggaggtttccttttaa

SEQ ID NO: 3920 - protein, 33 aa, Arabidopsis thaliana
DIIMSSAEDVKEQGNLTNEAEKSMPSSQQEVSF

SEQ ID NO: 3921 - DNA, 270 bp, Arabidopsis thaliana
  source 1..270: mol_type = genomic DNA
taggaggctgttgtaaagaagaagtatggagggctcatgccaaagaaaccacctctcatttccaaggatcatgagcgagcatactttgactcagctgattgggctcttggaaagcaaggtgttgcgaagccaaagggacccctggaagcccttcgtcccaagttacagccaacgcagcagcagacacgttacaggaagtctccatgtgctccatctgagggtggtgaagatggaggagctgctcaggccgagggaggttcaggcaactga

SEQ ID NO: 3922 - protein, 88 aa, Arabidopsis thaliana
EAVVKKKYGGLMPKKPPLISKDHERAYFDSADWALGKQGVAKPKGPLEALRPKLQPTQQQTRYRKSPCAPSEGGEDGGAAQAEGGSGN

SEQ ID NO: 3923 - DNA, 210 bp, Arabidopsis thaliana
  source 1..210: mol_type = genomic DNA
tagcggaggaggcagatgcagagaaatcaaacacagaagacgattcatatctccgaacatcattatccccatcttcgtcggagttgtcgtaatccccaaaagctctctcctctgcttcttcttcttcagcagaagaatagccttgaagcagcgtcaagctcatgtttgttcgttgctccaaagatctatcggagccgcaaacaaaaataa

SEQ ID NO: 3924 - protein, 68 aa, Arabidopsis thaliana
RRRQMQRNQTQKTIHISEHHYPHLRRSCRNPQKLSPLLLLLQQKNSLEAASSSCLFVAPKIYRSRKQK

SEQ ID NO: 3925 - DNA, 72 bp, Arabidopsis thaliana
  source 1..72: mol_type = genomic DNA
tgaatacgggatagttcaggcgccattaggaccagatatctccggaccagagcttgtagccgccgtcgctaa

SEQ ID NO: 3926 - protein, 22 aa, Arabidopsis thaliana
IRDSSGAIRTRYLRTRACSRRR

SEQ ID NO: 3927 - DNA, 57 bp, Arabidopsis thaliana
  source 1..57: mol_type = genomic DNA
tagccgccgtcgctaatgcaggagggattggtcttctcagatgtcctgattgggtaa

SEQ ID NO: 3928 - protein, 17 aa, Arabidopsis thaliana
PPSLMQEGLVFSDVLIG

SEQ ID NO: 3929 - DNA, 252 bp, Arabidopsis thaliana
  source 1..252: mol_type = genomic DNA
taaaagctcactctccttccacaaacaaaactttcctccttttggttttggtatctgtctactttcttcaatcaagatttcctcaaagttatggtgtgccaatcacctggtaagacaagatttcgaggattgaagtacgagaccggaaacgctaacgaatcaacaattgtagtgagagttattgaatgctatcaaccgatggataattgccaggctgagtacttcagacttctactcaaaccagtcacgtag

SEQ ID NO: 3930 - protein, 82 aa, Arabidopsis thaliana
KLTLLPQTKLSSFWFWYLSTFFNQDFLKVMVCQSPGKTRFRGLKYETGNANESTIVVRVIECYQPMDNCQAEYFRLLLKPVT

SEQ ID NO: 3931 - DNA, 114 bp, Arabidopsis thaliana
  source 1..114: mol_type = genomic DNA
tgatcagaatcaattagagtgtgtataagaggaagagaaagagaaaacagcatgtgtattgccgtataccgtaaagttttgagcttgaatctgtattgccgtgtgatactgtag

SEQ ID NO: 3932 - protein, 36 aa, Arabidopsis thaliana
SESIRVCIRGRERENSMCIAVYRKVLSLNLYCRVIL

SEQ ID NO: 3933 - DNA, 66 bp, Arabidopsis thaliana
  source 1..66: mol_type = genomic DNA
taaacacttttgaaaatgggatcacaacatttctatgtgtaccattgtgaacaaagaatcagctag

SEQ ID NO: 3934 - protein, 20 aa, Arabidopsis thaliana
TLLKMGSQHFYVYHCEQRIS

SEQ ID NO: 3935 - DNA, 114 bp, Arabidopsis thaliana; identical to SEQ ID NO: 3931
  source 1..114: mol_type = genomic DNA

SEQ ID NO: 3936 - protein, 36 aa, Arabidopsis thaliana; identical to SEQ ID NO: 3932

SEQ ID NO: 3937 - DNA, 66 bp, Arabidopsis thaliana; identical to SEQ ID NO: 3933
  source 1..66: mol_type = genomic DNA

SEQ ID NO: 3938 - protein, 20 aa, Arabidopsis thaliana
TLLKMGSQHFYVYHCEQRIS

SEQ ID NO: 3939 - DNA, 114 bp, Arabidopsis thaliana; identical to SEQ ID NO: 3931
  source 1..114: mol_type = genomic DNA

SEQ ID NO: 3940 - protein, 36 aa, Arabidopsis thaliana; identical to SEQ ID NO: 3932

SEQ ID NO: 3941 - DNA, 87 bp, Arabidopsis thaliana
  source 1..87: mol_type = genomic DNA
tgagacatgctcaggggattcacaatgtggatggggagaagaattataaggcttacatgtctcatgactactttgatgctgagttga

SEQ ID NO: 3942 - protein, 27 aa, Arabidopsis thaliana
DMLRGFTMWMGRRIIRLTCLMTTLMLS

SEQ ID NO: 3943 - DNA, 240 bp, Arabidopsis thaliana
  source 1..240: mol_type = genomic DNA
taatatttcgacacctgtttcagtctctttttttgtttcattcttcttcttcttcgtattcctcgatgttttagacgaagcagggactctcagtttacgagttacggaatctctctctgtctcagatccatcagaatagtttcttgcgcaaacccattcttgaagatggacagggcagatacatggggatttgtcagcggtgggagatgtttatatctcaagttgcttttatgtttatag

SEQ ID NO: 3944 - protein, 78 aa, Arabidopsis thaliana
YFDTCFSLFFCFILLLLRIPRCFRRSRDSQFTSYGISLCLRSIRIVSCANPFLKMDRADTWGFVSGGRCLYLKLLLCL

SEQ ID NO: 3945 - DNA, 216 bp, Arabidopsis thaliana
  source 1..216: mol_type = genomic DNA
tgaataatggcggctgcggcttttgggcagttaaatctagaggagcctccaccgatttggggatctcgtagtgtcgattgcttcgagaagcttgaacagattggtgaaggaacttacggccaagtgtacatggctaaagaaattaaaactggtgaaatcgtggctctgaaaaagatccgtatggacaatgaaagagaaggggtaagctacatttga

SEQ ID NO: 3946 - protein, 70 aa, Arabidopsis thaliana
IMAAAAFGQLNLEEPPPIWGSRSVDCFEKLEQIGEGTYGQVYMAKEIKTGEIVALKKIRMDNEREGVSYI

SEQ ID NO: 3947 - DNA, 132 bp, Arabidopsis thaliana
  source 1..132: mol_type = genomic DNA
tagaggagcctccaccgatttggggatctcgtagtgtcgattgcttcgagaagcttgaacagattggtgaaggaacttacggccaagtgtacatggctaaagaaattaaaactggtgaaatcgtggctctga

SEQ ID NO: 3948 - protein, 42 aa, Arabidopsis thaliana
RSLHRFGDLVVSIASRSLNRLVKELTAKCTWLKKLKLVKSWL

SEQ ID NO: 3949 - DNA, 102 bp, Arabidopsis thaliana
  source 1..102: mol_type = genomic DNA
tgaacgctccgccgtaagaattgtcctccgccgccgcgttttcccgtcgattcagaacagaaggattattgcttttgccaatctgtatcaatatccgtttga

SEQ ID NO: 3950 - protein, 32 aa, Arabidopsis thaliana
TLRRKNCPPPPRFPVDSEQKDYCFCQSVSISV

SEQ ID NO: 3951 - DNA, 153 bp, Arabidopsis thaliana
  source 1..153: mol_type = genomic DNA
tgattggtattagatgactatttcttagtattagtcaattctctgtttccatcttatatggatagtctagacacagagcaaagatccttctttggagaaaaagaagatgagagacgagagaggatcgtttcttcacgtattggtcgtagatag

SEQ ID NO: 3952 - protein, 49 aa, Arabidopsis thaliana
LVLDDYFLVLVNSLFPSYMDSLDTEQRSFFGEKEDERRERIVSSRIGRR

SEQ ID NO: 3953 - DNA, 93 bp, Arabidopsis thaliana
  source 1..93: mol_type = genomic DNA
tagacacagagcaaagatccttctttggagaaaaagaagatgagagacgagagaggatcgtttcttcacgtattggtcgtagatagatcttaa

SEQ ID NO: 3954 - protein, 29 aa, Arabidopsis thaliana
TQSKDPSLEKKKMRDERGSFLHVLVVDRS

SEQ ID NO: 3955 - DNA, 117 bp, Arabidopsis thaliana
  source 1..117: mol_type = genomic DNA
tgaaagatgcgaggaattagccaagtcttcttcgttttaccggaaagtttactcggagatagaagaaattggatgggaaccaataaggagattaggtggagatttaacgttttttag

SEQ ID NO: 3956 - protein, 37 aa, Arabidopsis thaliana
KMRGISQVFFVLPESLLGDRRNWMGTNKEIRWRFNVF

SEQ ID NO: 3957 - DNA, 153 bp, Arabidopsis thaliana
  source 1..153: mol_type = genomic DNA
tagcgaattaacttttgcttcgatgtaggatgtgccatatatgtttacactagaatggtcaacaagttcaagattgaaggatgtaatgcaccaattccaaaagcatttggactatcttcaagaattttggtctgtcttggacaatatcgataa

SEQ ID NO: 3958 - protein, 49 aa, Arabidopsis thaliana
RINFCFDVGCAIYVYTRMVNKFKIEGCNAPIPKAFGLSSRILVCLGQYR

SEQ ID NO: 3959 - DNA, 93 bp, Arabidopsis thaliana
  source 1..93: mol_type = genomic DNA
tgaaagatgcgaggaattagccaagtcttcttcgttttaccggaaagtttactcggaggtttggttaaccatcgatcccttcccttcttctga

SEQ ID NO: 3960 - protein, 29 aa, Arabidopsis thaliana
KMRGISQVFFVLPESLLGGLVNHRSLPFF

SEQ ID NO: 3961 - DNA, 177 bp, Arabidopsis thaliana
  source 1..177: mol_type = genomic DNA
taagcaaatggatggtacttggatttggatggtgtgacccttattggctactattaccaacaacggccagaaaatggcaggcaccgggaaatgccttcttgtcaccggccctcctggtgtcggaaaaaccacattgatcatgagagtgttggatatgatgagggtttccaaccctaa

SEQ ID NO: 3962 - protein, 57 aa, Arabidopsis thaliana
ANGWYLDLDGVTLIGYYYQQRPENGRHREMPSCHRPSWCRKNHIDHESVGYDEGFQP

SEQ ID NO: 3963 - DNA, 195 bp, Arabidopsis thaliana
  source 1..195: mol_type = genomic DNA
tgacccttattggctactattaccaacaacggccagaaaatggcaggcaccgggaaatgccttcttgtcaccggccctcctggtgtcggaaaaaccacattgatcatgagagtgttggatatgatgagggtttccaaccctaacttaaaaatccagggtttctacactcttataactaacacacagaagagatga

SEQ ID NO: 3964 - protein, 63 aa, Arabidopsis thaliana
PLLATITNNGQKMAGTGKCLLVTGPPGVGKTTLIMRVLDMMRVSNPNLKIQGFYTLITNTQKR

SEQ ID NO: 3965 - DNA, 69 bp, Arabidopsis thaliana
  source 1..69: mol_type = genomic DNA
tagacgtcaggactccagaagagttcagccagggacatgcctgtggggcgatcaacgtgccttacatga

SEQ ID NO: 3966 - protein, 21 aa, Arabidopsis thaliana
TSGLQKSSARDMPVGRSTCLT

SEQ ID NO: 3967 - DNA, 297 bp, Arabidopsis thaliana
  source 1..297: mol_type = genomic DNA
taactgagtgatggatataattttgtgattgtgaaacagggatgtcaaagaaccccgacttcctggaacaagtctcctcccatttcggacaatccgataacatcattgttggctgccagagcggtggtagatctatcaaagccaccaccgatcttctccatgcaggtttcacgggagtcaaagatatcgtcggtggctatagtgcctgggccaagaatggccttcctacaaaggcttgatgactcaccattcaccaaacatctttccttatctcttcgtctccttcttcttcaataa

SEQ ID NO: 3968 - protein, 97 aa, Arabidopsis thaliana
LSDGYNFVIVKQGCQRTPTSWNKSPPISDNPITSLLAARAVVDLSKPPPIFSMQVSRESKISSVAIVPGPRMAFLQRLDDSPFTKHLSLSLRLLLLQ

SEQ ID NO: 3969 - DNA, 399 bp, Arabidopsis thaliana
  source 1..399: mol_type = genomic DNA
tgacgtctcctctctcgctctccatcattcttcttctacttttgtgctctgcttcactttttcttctttccttttttctctctctcaacgaccaccaccatgcccggagttgccttctcctgtgttcctgcctccgatctgggaatcttcatctccgaatccaccaccttctcacgctccatctccgcctccctctcatcttcctccagttcaccctcctcctttcgctgttgcaccccattgaacctcaaatcgctgcgttctcatcgccgtcctaagatttctcatatttgttgcgacggaagctctatttccggatctggcctcggcgatcccgatctcgagtttctccaagcctctgtcctcgttgcaggtccaccttttcccatttccaaataa

SEQ ID NO: 3970 - protein, 131 aa, Arabidopsis thaliana
RLLSRSPSFFFYFCALLHFFFFPFFSLSTTTTMPGVAFSCVPASDLGIFISESTTFSRSISASLSSSSSSPSSFRCCTPLNLKSLRSHRRPKISHICCDGSSISGSGLGDPDLEFLQASVLVAGPPFPISK

SEQ ID NO: 3971 - DNA, 72 bp, Arabidopsis thaliana
  source 1..72: mol_type = genomic DNA
taatgggcttccgagacatttgttaccggaaacatcacaaaaagcttaagcagttccagaaggtggagataa

SEQ ID NO: 3972 - protein, 22 aa, Arabidopsis thaliana
WASETFVTGNITKSLSSSRRWR

SEQ ID NO: 3973 - DNA, 66 bp, Arabidopsis thaliana
  source 1..66: mol_type = genomic DNA
tgatatcctcttttcccgtaccgcgcgtttatgattctgattacgttcttggttgtttgcgattga

SEQ ID NO: 3974 - protein, 20 aa, Arabidopsis thaliana
YPLFPYRAFMILITFLVVCD

SEQ ID NO: 3975 - DNA, 183 bp, Arabidopsis thaliana
  source 1..183: mol_type = genomic DNA
tgagctttctttagcgcggcagtttccaagtcggagaaggctaataataataaatggaatgagagagcagagggaaggaggattttgccagattgcaaaaatctcacaacgatgacggtgcagaaaacgccattaacaacgattacaagagctgttgtgcatttccgattattgaaaggctga

SEQ ID NO: 3976 - protein, 59 aa, Arabidopsis thaliana
AFFSAAVSKSEKANNNKWNERAEGRRILPDCKNLTTMTVQKTPLTTITRAVVHFRLLKG

SEQ ID NO: 3977 - DNA, 129 bp, Arabidopsis thaliana
  source 1..129: mol_type = genomic DNA
tgaaaggtgaaacttatcgagtgttctgtgtcggaaccgccgataccaagcttgatgagctacgattccttgctggatcagtgcgatcaaatatcggcgcattctccaaaaactcgtcttccaaggtaa

SEQ ID NO: 3978 - protein, 41 aa, Arabidopsis thaliana
KVKLIECSVSEPPIPSLMSYDSLLDQCDQISAHSPKTRLPR

SEQ ID NO: 3979 - DNA, 111 bp, Arabidopsis thaliana
  source 1..111: mol_type = genomic DNA
tagtttccgttggccttttcaggtgaagaagattcacttgccttttcttctaaagtccccaacttttcagtctatctcccattgaagctcaagctttttatgggtttctag

SEQ ID NO: 3980 - protein, 35 aa, Arabidopsis thaliana
FPLAFSGEEDSLAFSSKVPNFSVYLPLKLKLFMGF

SEQ ID NO: 3981 - DNA, 90 bp, Arabidopsis thaliana
  source 1..90: mol_type = genomic DNA
taaagtccccaacttttcagtctatctcccattgaagctcaagctttttatgggtttctagcagaagctctgctttggatagtgacataa

SEQ ID NO: 3982 - protein, 28 aa, Arabidopsis thaliana
SPQLFSLSPIEAQAFYGFLAEALLWIVT

SEQ ID NO: 3983 - DNA, 132 bp, Arabidopsis thaliana
  source 1..132: mol_type = genomic DNA
tgattcttcagagagaaacaagccggaagtagtaaggataactcgtctccggtgaaatctcagccgttggatcagatcggtggacggtggataaaagatgcgtgtggagaagagagagtctgggttaaatga

SEQ ID NO: 3984 - protein, 42 aa, Arabidopsis thaliana
FFREKQAGSSKDNSSPVKSQPLDQIGGRWIKDACGEERVWVK

SEQ ID NO: 3985 - DNA, 162 bp, Arabidopsis thaliana
  source 1..162: mol_type = genomic DNA
tgagaaatgaagtttatgaaacttggatccaaacctgattcgtttcagtctgatgaagattgcgtaagatatgtagcaacggagttagcgactgatgtagttgtaattgttggagacgtgaaatttcatcttcataaggtaagagtcatgaactcattgtaa

SEQ ID NO: 3986 - protein, 52 aa, Arabidopsis thaliana
EMKFMKLGSKPDSFQSDEDCVRYVATELATDVVVIVGDVKFHLHKVRVMNSL

SEQ ID NO: 3987 - DNA, 363 bp, Arabidopsis thaliana
  source 1..363: mol_type = genomic DNA
taaacaaagagagaaagaaaaaaaagctcaaagaactcagaagaagaagaaagatgtatcatcaagaacaacatcctgtcggtgctcctcctccccaagggtatccacctaaggacggttatcctccggccggttatcctccagccggttatccaccgccaggatatgctcagggataccctgcacaaggttatcctccgccgcagtactctcaagctccgcagcagaagcaaaacgccggtatgcttgaaggatgtttggctgcgctctgttgttgctgtctcttggatgcatgtttctgatcggaggataattatatacgttgcctcagtcaacttttatttcctcatatatgttatgtaa

SEQ ID NO: 3988 - protein, 119 aa, Arabidopsis thaliana
TKRERKKSSKNSEEEERCIIKNNILSVLLLPKGIHLRTVILRPVILQPVIHRQDMLRDTLHKVILRRSTLKLRSRSKTPVCLKDVWLRSVVAVSWMHVSDRRIIIYVASVNFYFLIYVM

SEQ ID NO: 3989 - DNA, 90 bp, Arabidopsis thaliana
  source 1..90: mol_type = genomic DNA
taaatttatttgtttgtgtttaatcctttttatcgatctcaagcgacctctttgtcaaacctgacaatcccaaatgatgaagaattctga

SEQ ID NO: 3990 - protein, 28 aa, Arabidopsis thaliana
IYLFVFNPFYRSQATSLSNLTIPNDEEF

SEQ ID NO: 3991 - DNA, 57 bp, Arabidopsis thaliana
  source 1..57: mol_type = genomic DNA
taatcctttttatcgatctcaagcgacctctttgtcaaacctgacaatcccaaatga

SEQ ID NO: 3992 - protein, 17 aa, Arabidopsis thaliana
SFLSISSDLFVKPDNPK

SEQ ID NO: 3993 - DNA, 84 bp, Arabidopsis thaliana
  source 1..84: mol_type = genomic DNA
taagagaagaaatctctatgccccctttttcttggttttctcccatgcttttgttggtcaacaaccaaccacaactttctatag

SEQ ID NO: 3994 - protein, 26 aa, Arabidopsis thaliana
EKKSLCPLFLGFLPCFCWSTTNHNFL

SEQ ID NO: 3995 - DNA, 54 bp, Arabidopsis thaliana
  source 1..54: mol_type = genomic DNA
taatacggaattagcagggatagaggaggaaagcgcacgccgtgcgttccttaa

SEQ ID NO: 3996 - protein, 16 aa, Arabidopsis thaliana
YGISRDRGGKRTPCVP

SEQ ID NO: 3997 - DNA, 66 bp, Arabidopsis thaliana
  source 1..66: mol_type = genomic DNA
tagttagaacttctatcaatgcaattaaagaaccatcccttcctattagtttgtcctgtcagatag

SEQ ID NO: 3998 - protein, 20 aa, Arabidopsis thaliana
LELLSMQLKNHPFLLVCPVR

SEQ ID NO: 3999 - protein, 358 aa, Arabidopsis thaliana
MDLSLAPTTTTSSDQEQDRDQELTSNIGASSSSGPSGNNNNLPMMMIPPPEKEHMFDKVVTPSDVGKLNRLVIPKQHAERYFPLDSSNNQNGTLLNFQDRNGKMWRFRYSYWNSSQSYVMTKGWSRFVKEKKLDAGDIVSFQRGIGDESERSKLYIDWRHRPDMSLVQAHQFGNFGFNFNFPTTSQYSNRFHPLPEYNSVPIHRGLNIGNHQRSYYNTQRQEFVGYGYGNLAGRCYYTGSPLDHRNIVGSEPLVIDSVPVVPGRLTPVMLPPLPPPPSTAGKRLRLFGVNMECGNDYNQQEESWLVPRGEIGASSSSSSALRLNLSTDHDDDNDDGDDGDDDQFAKKGKSSLSLNFNP

SEQ ID NO: 4000 - protein, 645 aa, Arabidopsis thaliana
MDTNTSGEELLAKARKPYTITKQRERWTEDEHERFLEALRLYGRAWQRIEEHIGTKTAVQIRSHAQKFFTKLEKEAEVKGIPVCQALDIEIPPPRPKRKPNTPYPRKPGNNGTSSSQVSSAKDAKLVSSASSSQLNQAFLDLEKMPFSEKTSTGKENQDENCSGVSTVNKYPLPTKQVSGDIETSKTSTVDNAVQDVPKKNKDKDGNDGTTVHSMQNYPWHFHADIVNGNIAKCPQNHPSGMVSQDFMFHPMREETHGHANLQATTASATTTASHQAFPACHSQDDYRSFLQISSTFSNLIMSTLLQNPAAHAAATFAASVWPYASVGNSGDSSTPMSSSPPSITAIAAATVAAATAWWASHGLLPVCAPAPITCVPFSTVAVPTPAMTEMDTVENTQPFEKQNTALQDQNLASKSPASSSDDSDETGVTKLNADSKTNDDKIEEVVVTAAVHDSNTAQKKNLVDRSSCGSNTPSGSDAETDALDKMEKDKEDVKETDENQPDVIELNNRKIKMRDNNSNNNATTDSWKEVSEEGRIAFQALFARERLPQSFSPPQVAENVNRKQSDTSMPLAPNFKSQDSCAADQEGVVMIGVGTCKSLKTRQTGFKPYKRCSMEVKESQVGNINNQSDEKVCKRLRLEGEAST

SEQ ID NO: 4001 - protein, 229 aa, Arabidopsis thaliana
MQQQQSPQMFPMVPSIPPANNITTEQIQKMLGGSGNFESGFQEWTLKLDACLMLLFCTFSWLDYLDENKKLIMAIMENQNLGKLAECAQYQALLQKNLMYLAAIADAQPPPPTPGPSPSTAVAAQMATPHSGMQPPSYFMQHPQASPAGIFAPRGPLQFGSPLQFQDPQQQQQIHQQAMQGHMGIRPMGMTNNGMQHAMQQPETGLGGNVGLRGGKQDGADGQGKDDGK

SEQ ID NO: 4002 - protein, 711 aa, Arabidopsis thaliana
MAFSHDNRVRFKDEGKPLSSEYGYGRKARPSLDRVFKNVKWGFKKPLSFPSHKDPDHKETSSVTRKNIINPQDSFLQNWNKIFLFACVVALAIDPLFFYIPIVDSARHCLTLDSKLEIAASLLRTLIDAFYIIHIVFQFRTAYIAPSSRVFGRGELVDDAKAIALKYLSSYFIIDLLSILPLPQIVVLAVIPSVNQPVSLLTKDYLKFSIIAQYVPRILRMYPLYTEVTRTSGIVTETAWAGAAWNLSLYMLASHVFGALWYLISVEREDRCWQEACEKTKGCNMKFLYCENDRNVSNNFLTTSCPFLDPGDITNSTIFNFGIFTDALKSGVVESHDFWKKFFYCFWWGLRNLSALGQNLQTSKFVGEIIFAISICISGLVLFALLIGNMQKYLESTTVREEEMRVRKRDAEQWMSHRMLPEDLRKRIRRYEQYRWQETRGVEEETLLRNLPKDLRRDIKRHLCLDLLKKVPLFEIMDEQLLDAVCDRLRPVLYTENSYVIREGDPVGEMLFVMRGRLVSATTNGGRSGFFNAVNLKASDFCGEDLLPWALDPQSSSHFPISTRTVQALTEVEAFALTAEDLKSVASQFRRLHSKQLQHTFRFYSVQWRTWSVSFIQAAWRRYCRRKLAKSLRDEEDRLREALASQDKEHNAATVSSSLSLGGALYASRFASNALHNLRHNISNLPPRYTLPLLPQKPTEPDFTANHTTDP

SEQ ID NO: 4003 - protein, 540 aa, Arabidopsis thaliana
MILWKSLSCFSFVFGLLLYSASFVCAGDIVHHDDSLPQRPGCNNNFVLVKVPTRVNGSEYTEYVGVGARFGPTLESKEKHATLIKLAIADPPDCCSTPKNKLTGEVILVHRGKCSFTTKTKVAEAAGASAILIINNSTDLFKMVCEKGENVLDITIPVVMLPVDAGRSLENIVKSNAIVTLQLYSPKRPAVDVAEVFLWLMAVGTILCASYWSAWTVREEAIEQDKLLKDGSDELLQLSTTSSRGVVEVTVISAILFVVVASCFLIMLYKLMSFWFIEVLVVLFCIGGVEGLQTCLVSLLSCFRWFRRFGESYVKVPFLGAVSYLTLAICPFCIAFAVFWAVKRQYSYAWIGQDILGISLIITVLQIVRVPNLKVGFVLLSCAFMYDIFWVFVSKWWFRESVMIVVARGDRSGEDGIPMLLKIPRMFDPWGGYSIIGFGDIILPGLLVTFALRYDWLANKRLKSGYFLGTMSAYGLGLLITYIALNLMDGHGQPALLYIVPFILGTLFVLGHKRGDLKTLWTTGEPDRPCPHVRLQPQSS

SEQ ID NO: 4004 - protein, 205 aa, Arabidopsis thaliana
MSFTGTLDKCNVCDKTVYVVDMLSIEGMPYHKSCFRCTHCKGTLQMSNYSSMDGVLYCKTHFEQLFKESGNFSKNFQPGKTEKPELTRTPSKISSIFCGTQDKCAACEKTVYPLEKIQMEGECFHKTCFRCAHGGCTLTHSSYASLDSVLYCRHHFNQLFMEKGNYAHVLQAANHRRTASGNTLPPEPTEDVAVEAKEENGVSES

SEQ ID NO: 4005 - protein, 599 aa, Arabidopsis thaliana
MGVGGNFWDLLRPYAQQQGFDFLRNKRVAVDLSFWIVQHETAVKGFVLKPHLRLTFFRTINLFSKFGAYPVFVVDGTPSPLKSQARISRFFRSSGIDTCNLPVIKDGVSVERNKLFSEWVRECVELLELLGIPVLKANGEAEALCAQLNSQGFVDACITPDSDAFLFGAMCVIKDIKPNSREPFECYHMSHIESGLGLKRKHLIAISLLVGNDYDSGGVLGIGVDKALRIVREFSEDQVLERLQDIGNGLQPAVPGGIKSGDDGEEFRSEMKKRSPHCSRCGHLGSKRTHFKSSCEHCGCDSGCIKKPLGFRCECSFCSKDRDLREQKKTNDWWIKVCDKIALAPEFPNRKIIELYLSDGLMTGDGSSMSWGTPDTGMLVDLMVFKLHWDPSYVRKMLLPMLSTIYLREKARNNTGYALLCDQYEFHSIKCIKTRYGHQSFVIRWRKPKSTSGYSHSHSEPEESIVVLEEEEESVDPLDGLNEPQVQNDNGDCFLLTDECIGLVQSAFPDETEHFLHEKKLRESKKKNVSEEETATPRATTMGVQRSITDFYRSAKKAAAGQSIETGGSSKASAEKKRQATSTSSSNLTKSVRRRLLFG

SEQ ID NO: 4006 - protein, 673 aa, Arabidopsis thaliana
MSFSDSESSSHGGGGGDYKFFRQISRDRLLHEMLGSTKTGDSKAWKILIMDRVTVKVMSQSCKMADITDQGISLVEELFKRREPMPGMDAIYFIQPSKENIVMFLSDMSGREPLYRKAFIFFSSTIPKELVNHIKSDSSVLPRIGALREMNMEYFPIDNQGFLTDHEQALETLYAEDAENSRHFHICLNIMATRIATVFASLKELPFVRYRAAKSTASRDLVPSKLAAAIWDCISKYKAIPNFPQTETCELLIVDRSVDQIAPIIHEWTYDAMCHDLLDMEGNKHVIEVPSKTGGPPEKKEIVLEDHDPVWLELRHTHIADASERLHEKMTNFASKNKAAQMRSRDGSELSTRDLQKIVQALPQYGEQVDKLSTHVELAGKINRIIRDTGLRDLGQLEQDLVFGDAGAKDVINFLRTNQDTNPENKLRLLMIYATVYPEKFEGDKGVKLMQLARLSPVDMKVISNMQLIAGSPENKAKSGSFSLKFDAGKTKQANRKDRSGEEETWQLFRFYPMIEELLEKLVKGDLSKSDYLCMNQSSHKEESEARTGSVRKSSAPTAVPERKATPHSMRSRRTATWARPHSSDDGYSSDSVLKSASTEFKKLGQRIFVFIIGGATRSELRVCHKLTSSLRREVVLGSTSFDDPPQYITKLKLLSEKDIQGAPAQPFKPQYW

SEQ ID NO: 4007 - protein, 497 aa, Arabidopsis thaliana
MPTDSKMAKFLQSYGYDLILGSVAAIYVVMAPYTKVEESFNVQSMHDILYHRHHLDSYDHLEFPGVVPRTFIGAFIVSVFASPVVSIISCLGFPKVYSLVAARLVLGCIILSTLRFFRIQIKKKFGNQVETFFVLFTSLQFHFLFYCTRPLPNILALGLVNLAYGNWLKGNFYPALSFLIFATVIFRCDTMLLLGPIGLELLLTKSISFWKALKYCVGTALLAVGLTIFVDSIMWKKFVWPEFEVFWFNSILNRSSDWGTHSIHWYFTSALPRSLLVAYPLSLLGTLVDRRVPFFIVPVLSFVILYSKLPHKELRFIISSVPMFNLSAAVAASRIYNNRKKTIWKLVNMVMLAFFAISAGCTVVTFMASYYNYPSGYALKRLHQIGHPANVAGEEWVHIDTFGAMNGISRFCEDDFPWRYSKEEEIVVEELRNRNFTYLVNEHSSVDGYKCLFYEEGFERLELRRGFPPIVLVKKAKVYLHREMKKEDPFHKKWPGC

SEQ ID NO: 4008 - protein, 630 aa, Arabidopsis thaliana
MATKPGVLTDWPWTPLGSFKYIVIAPWAVHSTYRFVTDDPEKRDLGYFLVFPFLLFRILHNQVWISLSRYYTSSGKRRIVDKGIDFNQVDRETNWDDQILFNGVLFYIGINLLPEAKQLPWWRTDGVLMAALIHTGPVEFLYYWLHKALHHHFLYSRYHSHHHSSIVTEPITSVIHPFAEHIAYFILFAIPLLTTLLTKTASIISFAGYIIYIDFMNNMGHCNFELIPKRLFHLFPPLKFLCYTPSYHSLHHTQFRTNYSLFMPLYDYIYGTMDESTDTLYEKTLERGDDIVDVVHLTHLTTPESIYHLRIGLASFASYPFAYRWFMRLLWPFTSLSMIFTLFYARLFVAERNSFNKLNLQSWVIPRYNLQYLLKWRKEAINNMIEKAILEADKKGVKVLSLGLMNQGEELNRNGEVYIHNHPDMKVRLVDGSRLAAAVVINSVPKATTSVVMTGNLTKVAYTIASALCQRGVQVSTLRLDEYEKIRSCVPQECRDHLVYLTSEALSSNKGFWVKVWLVGEGTTREEQEKATKGTLFIPFSQFPLKQLRRDCIYHTTPALIVPKSLVNVHSCENWLPRKAMSATRVAGILHALEGWEMHECGTSLLLSDLDQVWEACLSHGFQPLLLPHH

SEQ ID NO: 4009 - protein, 502 aa, Arabidopsis thaliana
MAMAPVIKLVLGSVAFAIFWILAVFPSVPFLPIGRTAGSLFGAMLMVIFQVITPEQAYAAIDLPILGLLFGTMVVSIYLERADMFKYLGTLLSWKSRGPKDLLCRVCLVSAVSSALFTNDTSCVVLTEFVLKIARQKNLPPHPFLLALATSANIGSSATPIGNPQNLVIAVQSKIPFWEFLLGVFPAMIVGITVNAMLLLGMYWRLLSDHKEDEEEVQNADSEVVAQEDVQSHRFSPATFSPVSSEDSNLRMDAAETLRNRAGSAGESELISCNSNASREQHNDAESQGESNNTNNMFQTKRWRRVLWKSSVYFITLGMLISLLMGLNMSWTAITAALALVVLDFKDARPSLEKVSYSLLIFFCGMFITVDGFNKTGIPTALWDLMEPYAKIDQAKGIAVLAVVILVLSNVASNVPTVLLLGARVAASAMGREEEKKAWLLLAWVSTVAGNLTLLGSAANLIVCEQARRAVSHGYTLTFTKHFKFGLPSTLIVTAIGLFLIK

SEQ ID NO: 4010 - protein, 443 aa, Arabidopsis thaliana
MNKNQTVGLDSEDDDSDDYDIAQVNCELALVEGQLCNIPYELYDLPDLTGILSVETWNSLLTEEERFFLSCFLPDMDPQTFSLTMQELLDGANLYFGNPEDKFYKNLLGGLFTPKVACFKEGVMFVKRRKYYYSLKFYHEKLIRTFTEMQRVWVQYGNKLGNYSRLLIWSGRTQTGNLKLLDLNRVPSKEMDSATCRFKTPNVVKPVERNRSKSLTFPRSGSSKNSLKIKITKEGVFRYQGSSLVSAGHHHQTLPKGVLKLVPKSSSAILRKPYVAPGNNLLQIHETGSKSTRFAASPYLGTTFEKPPYGTLGCSIPDPFLTYLETTQRSIQGTEPVFHDPTHTVPSALRVSNYSITEQNIPLKQEEYVRYHLKSPGFKPRTVDRGSETTESKRISSSNNFQREAKALRKPLGVLSEDNHAREANSDHLFSLTYKRRKVQRIA

SEQ ID NO: 4011 - protein, 231 aa, Arabidopsis thaliana
MDQMLSGEQDLEVDIEAGRSDVTQESTSDTVSGNGVWSERANFGVSEKIADDLSYPLIRDENRVETSSQSLDLSEKKCGNGKFKKSRKASKPPRPPKGPSLSENDRKIMRDIQELAMRKRARIERMKKSLKRLKAAKTSPSSPCITIFSMIITAIFFAFLVFQGFSTGSSSMNSDKSPAPTVSPNNQMISVQFYNDFAPVEQTDPSPTTSLRYTRKRISGAEEEDSRDVTR

SEQ ID NO: 4012 - protein, 361 aa, Arabidopsis thaliana
MHWITRFSAFFSAALAMILLSPSLQSFSPAAAIRSSHPYADEFKPQQNSDYSSFRESPMFRNAEQCRSSGEDSGVCNPNLVHVAITLDIDYLRGSIAAVNSILQHSMCPQSVFFHFLVSSESQNLESLIRSTFPKLTNLKIYYFAPETVQSLISSSVRQALEQPLNYARNYLADLLEPCVKRVIYLDSDLVVVDDIVKLWKTGLGQRTIGAPEYCHANFTKYFTGGFWSDKRFNGTFKGRNPCYFNTGVMVIDLKKWRQFRFTKRIEKWMEIQKIERIYELGSLPPFLLVFAGHVAPISHRWNQHGLGGDNVRGSCRDLHSGPVSLLHWSGSGKPWLRLDSKLPCPLDTLWAPYDLYKHSH

SEQ ID NO: 4013 - protein, 267 aa, Arabidopsis thaliana
MSAMDVMIHSSSFLLPCDETSTGTRYALVVLNQSLPRFTPLLWEHAKLRLCADGGANRIYDELPLFFPNEDALAIRNRYKPDVIKGDMDSIRRDVLDFYINLGTKVIDESHDQDTTDLDKCILYIRHSTLNQETSGLQILATGALGGRFDHEAGNLNVLYRYPDTRIVLLSDDCLIQLLPKTHRHEIHIQSSLEGPHCGLIPIGTPSAKTTTSGLQWDLSNTEMRFGGLISTSNLVKEEKITVESDSDLLWTISIKKTGLSIQDHTP

SEQ ID NO: 4014 - protein, 208 aa, Arabidopsis thaliana
MAGIKVFGHPASTATRRVLIALHEKNVDFEFVHVELKDGEHKKEPFILRNPFGKVPAFEDGDFKIFESRAITQYIAHEFSDKGNNLLSTGKDMAIIAMGIEIESHEFDPVGSKLVWEQVLKPLYGMTTDKTVVEEEEAKLAKVLDVYEHRLGESKYLASDHFTLVDLHTIPVIQYLLGTPTKKLFDERPHVSAWVADITSRPSAQKVL

SEQ ID NO: 4015 - protein, 1733 aa, Arabidopsis thaliana
MTAVVNGNSKRYSWWWDSHISPKNSKWLQENLTDMDSKVKQMIKVIEEDADSFARRAEMYYKKRPELMKLVEEFYRAYRALAERYDHATGVIRHAQQTMAEAFPNQDPMMFGEESPLGSSTDGFDPQTPDSYPPIRAPVYPDDLRKGAFGISSSHLSTVKRNIAFMEDPQSVSSGKGFKTAKARKGLNFNNVDGKEINAKVLSESERASKAEAEIVALKDALSKVQAEKEASLAQFDQNLEKLSNLESEVSRAQEDSRVLIERATRAEAEVETLRESLSKVEVEKESSLLQYQQCLQNIADLEDRISLAQKEAGEVDERANRAEAETLALKQSLVSSETDKEAALVQYQQCLKTISNLEERLHKAEEDSRLTNQRAENAEGEVESLKQKVSKLIEENEAYELQYQQCLDTIADLKLKLFHAQEETQRLSREIEDGVAKLKFAEEKCVVLERSNQNLHSELDGLLEKLGNQSHELTEKQKELGRLWTCVQEENLRFMEAETAFQTLQQLHSQSQEELSTLALELQNRSQILKDMEARNNGLQEEVQEAKDQSKSLNELNLSSAASIKSLQEEVSKLRETIQKLEAEVELRVDQRNALQQEIYCLKEELSQIGKKHQSMVEQVELVGLHPESFGSSVKELQEENSKLKEIRERESIEKTALIEKLEMMEKLVQKNLLLENSISDLNAELETIRGKLKTLEEASMSLAEEKSGLHSEKDMLISRLQSATENSKKLSEENMVLENSLFNANVELEELKSKLKSLEESCHLLNDDKTTLTSERESLLSHIDTMRKRIEDLEKEHAELKVKVLELATERESSLQKIEELGVSLNAKDCEYASFVQFSESRMNGMESTIHHLQDENQCRVREYQVELDRAHDAHIEIIVLQKCLQDWLEKSSSLIAENQDIKEASKLLEKLVSELEEENIGKQVQIDSSINCIKILRTGIYQVLMKLEIIPGIGSGDENSRDQRNMHDILNRLEDMQTMLLSIRDENQHSAIENLVLIEFLRQLKSEAVGIETEKKILEEELESQCQQLSFSRDETQKLIFVNGELTTKVNQGVNREKVLMVEIEDFHRQVLQLRDDYTILQGDNNKTLDEKAYLTKSTLQLEEEKCKLEDDISLLLSETIYQSNLIILLEDVILEKLSGAMKLNEDLDRLSIVKCKLEEEVRELGDKLKSADIANFQLQVVLEKSNAELLSARSANVHLEHEIANVKVQKEKELLEAMLMISIMQNEKSELSKAVEGLECRYKEAKAIEEDRDKQVLRLRGDYDEQVKKNSHSNEANLKLEADLMNLLMELEEIKVEKENLNQELFTERNEIELWESQSATLFGELQISAVHETLLEGLTNELVEACKNLESRSTLKDREIEQLKGRVNNLEDANKGQNDLMCKYAQAIFLLKESIQSLEKHAMLHEFENGPATETASLVDNSDGFLEIQELHLRIKAIEEAITKKLAMEELKTSSARRSRRRNGSLRKQNHEIYSEETEMITKDIVLDQVSDCSSYGISTRDILKIEDDHSLEAKSQNPPKGKSLSEESLVVDKLEISDRFTDPNKDANKRKVLERLNSDLQKLSNLHVAVEDLKIKVETEEKDEKGKENEYETIKGQINEAEEALEKLLSINRKLVTKVQNGFERSDGSKSSMDLDENESSRRRRISEQARRGSEKIGRLQLEIQRLQFLLLKLEGDREDRAKAKISDSKTRILLRDYIYSGVRGERRKRIKKRFAFCGCVQPPPSP

SEQ ID NO: 4016 - protein, 882 aa, Arabidopsis thaliana
MAAWSPSVGIGSCCLNNGITRTWKFPSARLFTGRKNKIKLGSETLMFTRKRFMGDLVTSALQSYQFSKICASKTSIELREALSSRRAEADDLKKVTSYSFRTKAGALVKVKVEKKREKYSILVYVSSLELSGDDKSRLVMVWGVYRSDSSCFLPLDFENSSQDSQTHTTETTFVKSSLSELMLGLEFDGKESPFYLSFHLKLVSGRDPDGQEMLTHRDTDFCIPVGFTAGHPLPLGLSSGPDDDSWNFSFFSRSSTNVVLCLYDDSTTDKPALELDLDPYVNRTGDVWHASVDNTWDFVRYGYRCKETAHSKEDVDVEGEPIVLDPYATVVGKSVSQKYLGSLSKSPSFDWGEDVSPNIPLEKLLVYRLNVKGFTQHRSSKLPSNVAGTFSGVAEKVSHLKTLGTNAVLLEPIFSFSEQKGPYFPFHFFSPMDIYGPSNSLESAVNSMKVMVKKLHSEGIEVLLEVVFTHTADSGALRGIDDSSYYYKGRANDLDSKSYLNCNYPVVQQLVLESLRYWVTEFHVDGFCFINASSLLRGVHGEQLSRPPLVEAIAFDPLLAETKLIADCWDPLEMMPKEVRFPHWKRWAELNTRYCRNVRNFLRGRGVLSDLATRICGSGDVFTDGRGPAFSFNYISRNSGLSLVDIVSFSGPELASELSWNCGEEGATNKSAVLQRRLKQIRNFLFIQYISLGVPVLNMGDECGISTRGSPLLESRKPFDWNLLASAFGTQITQFISFMTSVRARRSDVFQRRDFLKPENIVWYANDQTTPKWEDPASKFLALEIKSESEEEETASLAEPNEPKSNDLFIGFNASDHPESVVLPSLPDGSKWRRLVDTALPFPGFFSVEGETVVAEEPLQQLVVYEMKPYSCTLFETINTTA

SEQ ID NO: 4017 - protein, 286 aa, Arabidopsis thaliana
MSFNKVPNIPGAPALSALLKVSVIGGLGVYALTNSLYNVDGGHRAVMFNRLTGIKEKVYPEGTHFMVPWFERPIIYDVRARPYLVESTTGSHDLQMVKIGLRVLTRPMGDRLPQIYRTLGENYSERVLPSIIHETLKAVVAQYNASQLITQREAVSREIRKILTERASNFDIALDDVSITTLTFGKEFTAAIEAKQVAAQEAERAKFIVEKAEQDRRSAVIRAQGEAKSAQLIGQAIANNQAFITLRKIEAAREIAQTIAQSANKVYLSSNDLLLNLQEMNLEPKK

SEQ ID NO: 4018 - protein, 471 aa, Arabidopsis thaliana
MDLVIGGKFKLGRKIGSGSFGELYLGINVQTGEEVAVKLESVKTKHPQLHYESKLYMLLQGGTGVPNLKWYGVEGDYNVMVIDLLGPSLEDLFNYCNRKLSLKTVLMLADQLINRVEFMHTRGFLHRDIKPDNFLMGLGRKANQVYIIDFGLGKKYRDLQTHRHIPYRENKNLTGTARYASVNTHLGVEQSRRDDLEALGYVLMYFLKGSLPWQGLKAGTKKQKYDRISEKKVATPIEVLCKNQPSEFVSYFRYCRSLRFDDKPDYSYLKRLFRDLFIREGYQFDYVFDWTVLKYPQIGSSSGSSSRTRNHTTANPGLTAGASLEKQERIAGKETRENRFSGAVEAFSRRHPATSTTRDRSASRNSVDGPLSKHPPGDSERPRSSSRYGSSSRRAIPSSSRPSSAGGPSDSRSSSRLVTSTGGVGTVSNRASTSQRIQAGNESRTSSFSRAARNTREDPLRRSLELLTLRK

SEQ ID NO: 4019 - protein, 529 aa, Arabidopsis thaliana
MDIDGVDDDLHILDPELLQLPGLSPSPLKPTSLIADDLFSQWLSLPETATLVKSLIDDAKSGTPTNKSKNLPSVFLSSSTPPLSPRSSSGSPRFSRQRTSPPSLHSPLRSLKEPKRQLIPQFYYQHGRPPAKELKEQCLSMVDQVFSNYIDGLHVDEFKSITKQVCKLPSFLSPALFRKIDPNCTDIVTRDAFIKYWIDGNMLTMDTASQIYNILRQQGCSYLRQADFKPVLDELLATHPGLEFLRTISEFQERYAETVIYRIFYYINRSGTGCLTLRELRRGNLIAAMQQLDEEDDINKIIRYFSYEHFYVIYCKFWELDGDHDCFIDKDNLIKYGNNALTYRIVDRIFSQIPRKFTSKVEGKMSYEDFVYFILAEEDKSSEPSLEYWFKCVDLDGNGVITSNEMQFFFEEQLHRMECITQEAVLFSDILCQIIDMIGPEKENCITLQDLKGSKLSANVFNILFNLNKFMAFETRDPFLIRQEREDPNLTEWDRFAQREYARLSMEEDVDEVSNGSADVWDEPLEPPF

SEQ ID NO: 4020 - protein, 367 aa, Arabidopsis thaliana
MLECCEPLEIVKDKGISFGKVVCLAHSSGAKVEAFRTNQSTIDDFRKYVVKCSTSDNCHMISTYHRQVLKQTGTGHFSPIGGYNAERDMALILDVARFKYPPHWVPLKLLWDAMDSIDQSTGRRRGFMLISRPHREPGLLYTLSCKDESWISIAKYLKEDVPRLVSSQHVDTIERILYVVFKSLPANFNQFIKWMAEIRRTEDVNQNLSSEEKSRLKLKQELLKQVQETKLFKHVDKFLSSVYEDNLPYVAAKVYCDGDEILSGYESDESCCKETCVKCIKGLGEEKVTVVAYPSGNDVFTALLLALPPQTWSGIKDQSLLQEMKQLISMVSHPTLLQQEVLHLRRQLEMLKRCQENKEDEELSAPA

SEQ ID NO: 4021 - protein, 1514 aa, Arabidopsis thaliana
MDFIEISLIFREHLPLLELCSVIINLLLFLVFLFAVSARQILVCVRRGRDRLSKDDTVSASNLSLEREVNHVSVGFGFNLSLLCCLYVLGVQVLVLVYDGVKVRREVSDWFVLCFPASQSLAWFVLSFLVLHLKYKSSEKLPFLVRIWWFLAFSICLCTMYVDGRRLAIEGWSRCSSHVVANLAVTPALGFLCFLAWRGVSGIQVTRSSSDLQEPLLVEEEAACLKVTPYSTAGLVSLITLSWLDPLLSAGSKRPLELKDIPLLAPRDRAKSSYKVLKSNWKRCKSENPSKPPSLARAIMKSFWKEAACNAVFAGLNTLVSYVGPYLISYFVDYLGGKEIFPHEGYVLAGIFFTSKLIETVTTRQWYMGVDILGMHVRSALTAMVYRKGLKLSSIAKQNHTSGEIVNYMAVDVQRIGDYSWYLHDIWMLPMQIVLALAILYKSVGIAAVATLVATIISILVTIPLAKVQEDYQDKLMTAKDERMRKTSECLRNMRVLKLQAWEDRYRVRLEEMREEEYGWLRKALYSQAFVTFIFWSSPIFVAAVTFATSIFLGTQLTAGGVLSALATFRILQEPLRNFPDLVSMMAQTKVSLDRISGFLQEEELQEDATVVIPRGLSNIAIEIKDGVFCWDPFSSRPTLSGIQMKVEKGMRVAVCGTVGSGKSSFISCILGEIPKISGEVRICGTTGYVSQSAWIQSGNIEENILFGSPMEKTKYKNVIQACSLKKDIELFSHGDQTIIGERGINLSGGQKQRVQLARALYQDADIYLLDDPFSALDAHTGSDLFRDYILSALAEKTVVFVTHQVEFLPAADLILVLKEGRIIQSGKYDDLLQAGTDFKALVSAHHEAIEAMDIPSPSSEDSDENPIRDSLVLHNPKSDVFENDIETLAKEVQEGGSASDLKAIKEKKKKAKRSRKKQLVQEEERVKGKVSMKVYLSYMGAAYKGALIPLIILAQAAFQFLQIASNWWMAWANPQTEGDESKVDPTLLLIVYTALAFGSSVFIFVRAALVATFGLAAAQKLFLNMLRSVFRAPMSFFDSTPAGRILNRVSIDQSVVDLDIPFRLGGFASTTIQLCGIVAVMTNVTWQVFLLVVPVAVACFWMQKYYMASSRELVRIVSIQKSPIIHLFGESIAGAATIRGFGQEKRFIKRNLYLLDCFVRPFFCSIAAIEWLCLRMELLSTLVFAFCMVLLVSFPHGTIDPSMAGLAVTYGLNLNGRLSRWILSFCKLENKIISIERIYQYSQIVGEAPAIIEDFRPPSSWPATGTIELVDVKVRYAENLPTVLHGVSCVFPGGKKIGIVGRTGSGKSTLIQALFRLIEPTAGKITIDNIDISQIGLHDLRSRLGIIPQDPTLFEGTIRANLDPLEEHSDDKIWEALDKSQLGDVVRGKDLKLDSPVLENGDNWSVGQRQLVSLGRALLKQAKILVLDEATASVDTATDNLIQKIIRTEFEDCTVCTIAHRIPTVIDSDLVLVLSDGRVAEFDTPARLLEDKSSMFLKLVTEYSSRSTGIPEL

SEQ ID NO: 4022 - protein, 793 aa, Arabidopsis thaliana
MTESIWLNDQSSPRSMIPSAKPVANVHRQRCRSVFKLLVQREISPNTKFVPRKRWGESRCDADSSCGTTSEPVREQGLNLISWVEAESLQHLSAKYCPLVPPPRSTIAAAFSSDGRTLASTHGDHTVKIIDCETGKCLKILTGHRRTPWVVRFHPRHSEIVASGSLDHEVRLWNAKTGECIRTHDFYRPIASIAFHAGGELLAVASGHKLHIWHYNKGGDDSAPAIVLKTRRSLRAVHFHPHGVPLLLTAEVTDIDSSDSAMTRSTSPGYLRYPPPAIFFTNTQSGSRTSLAAELPLVPLPYLLLPSYSADDPRILYSSGTTGPRNAQTRFQSNQSSVEHGSRTISPSPLPMATSADLSGSYHVPDNSASNTFATQAGARNSTTAVDAMDVDEAQPVGRNRVPSQVSSQPDLLEFGQLQQLFHFRDRGSWELPFLQGWLMAQSQAGANSVALPTGSSGHVNSTPYMGSSSASHSSTASLEAGVASLEIPGGVNLYGVSARGDSRDRILQSRFAGSGLAEGRSSRNTQHEGADAQPVVNRIPSELASSIAAAELPCTVKLRVWSHDIKDPCSILKSDKCRLTIHHAVLCSEMGAHFSPCGRYLAACVACVIPHAETDPSLQTLVQQDSGLATSPTRHPVTAHQVMYELRVYSLEKESFGSVLVSRAIRAAHCLTSIQFSPTSEHILLAYGRRHGSLLKSIVSDGETTSHFFTVLEIYRVSDMELVRVLPSSEDEVNVACFHPSPGGGLVYGTKEGKLRIFRYNTAAASNLTAPNSSPDENLAEVELLTRCRPMR

SEQ ID NO: 4023 - protein, 1082 aa, Arabidopsis thaliana
MAEAVDEDSGVGRSLEESSNGQHSQAGEALSEWRSSGQVENGTPSTSPSYWDIDDDDDYGLKPSELYGQYTWKIPKFSEITKREHRSNVFEAGGYKWYILIYPQGCDVCNHLSLFLCVANYDKLLPGSFAILEAGWSQFAQFTISVLSQDLKKSKFSDTLHRFWKKEHDWGWKKFMELPKLKDGFIDESGCLTIEAKVQVIRERVDRPFRCLDCGYRRELVRVYFQNVEQICRRFVEEKRSKLGRLIEDKARWTSFGVFWLGMDQNSRRRMCREKVDVILKGVVKHFFVEKEVSSTLVMDSLYSGLKALEGQTKNMKARSRLLDAKQLPAPIVSVDKDMFVLVDDVLLLLERAALEPLPPKDEKGRQNRTKDGNDGEEVNKEADERDERRLTELGRRTVEIFILSHIFSTKIEVAHQEAIALKRQEELIREEEEAWLAETEQRAKRGAAEREKKSKKKQAKQKRNKNKGKDKRKEEKVSFATHAKDLEENQNQNQNDEEEKDSVTEKAQSSAEKPDTLGDVSDISDSVDGSADILQPDLEDRDSSSVLWDTDALEIHPPSSEGSSRGRGISISTPNGITEGKSHSTMDDSSSTCSNDSIRSGVTNGSYQGNSLNFRNQKSPNKGKNQQVKAMTDAHSLASETDDQPSTLGTDPKGQNYSSEASNVGESDWVVVSHIQEPEGSRNRIPVGRERKTVQSIVNSVDMDRPKEKSTAVLSSPRNVAKNPSPLTQTKPEKKSISTADGIPNRKVLATGPPSSSQVVLPSDIQSQTVGLRADMQKLSAPKQPPATTISRPSSAPIIPAMRPSPITVSSSVQTTTSLPRSVSSAGRLGPDPSLHNQQTYTPQSYKNAIVGNSLGSSSSSFNHHPSSHGVVPTTLPSSSYSQAPTSSYQSSFPYSQDGLLWTGRSPSSVNMGMYNNTYSPAVTSNRSLNHMDVQIAQQQAQSMMTDEFPHLDIINDLLEDEQCSNMVYNGSIFNPQPQVFNGQYSSYHGELLSGGRTRSFGEEGLHYMARGPYGTDGMMPRQWQMTNMDLSLPAMRSNGMEDGTSSAANYHHSYFGLDASNPSFTSGINGYTEFRPSNGH

SEQ ID NO: 4024 - protein, 468 aa, Arabidopsis thaliana
MDRVVGGKFKLGRKLGSGSFGEIFLGVNVQTGEEVAVKLEPLRARHPQLHYESKLYMLLQGGTGIPHLKWFGVEGEFNCMVIDLLGPSMEEFFNYCSRSFSLKTVLMLADQMINRVEYMHVKGFLHRDIKPDNFLMGLGRKANQVYIIDYGLAKKYRDLQTHKHIPYRENKNLTGTARYASVNTHLGIEQSRRDDLESLGYLLMYFLRGSLPWQGLRAGTKKQKYDKISEKKRLTPVEVLCKNFPPEFTSYFLYVRSLRFEDKPDYSYLKRLFRDLFIREGYQFDYVFDWTILRYPQFGSSSSSNSKPRPTLRPAMNIPVPSADKAEKPPIGQDSRERFSGVFEAYTRRNGSGTGVQADQSSRPRTSENVLASKDTQNQERPNSLSRNLSSSRKAIAGSSVRATSSADFTENRLSRLIPNNDRSSTTLRTQFAPSSSSVATKAAPTRAARDITLQSLELLSIGNSKRK

SEQ ID NO: 4025 - protein, 56 aa, Arabidopsis thaliana
MVNLASEEEEEDGGDNINRLRDTAGEAALPSPASLAVSKATSRSRRRPRKALNRGK

SEQ ID NO: 4026 - protein, 334 aa, Arabidopsis thaliana
MVIQLGCSKNDLVILAWMFHLMTFNDTWFCFHHVQGVSGSIVLRHGRLSDLIAQLQDLLNGAQGVESTPFKYDGALLAAQIRQLANEIKELTMTNPVTIFNGDSNSSGYASYLVPAAAVGAMGYCYMWWKGWSFSDAMFVTKKNMADAVASVSKQLDDLSDTLASTRKHLSQKLATLDWKVEEQNETSKMILSDVTEMRSSISQIGFDFKQLNEMISGIEGKIESLESKQDVTLSGLWHLCQVAGVKDSTSTKVFQDVGERLPIDGKPSTNTSLSGLRFLTEGKEDANVIHKPVMAKEIMVMGEKTKVTAAGRSRVHRAFPGGISWVRDVSGLS

SEQ ID NO: 4027 - protein, 490 aa, Arabidopsis thaliana
MAETTSWIPVWFPLMVLGCFGLNWLVRKVNVWLYESSLGENRHYLPPGDLGWPFIGNMLSFLRAFKTSDPDSFTRTLIKRYGPKGIYKAHMFGNPSIIVTTSDTCRRVLTDDDAFKPGWPTSTMELIGRKSFVGISFEEHKRLRRLTAAPVNGHEALSTYIPYIEENVITVLDKWTKMGEFEFLTHLRKLTFRIIMYIFLSSESENVMDALEREYTALNYGVRAMAVNIPGFAYHRALKARKTLVAAFQSIVTERRNQRKQNILSNKKDMLDNLLNVKDEDGKTLDDEEIIDVLLMYLNAGHESSGHTIMWATVFLQEHPEVLQRAKAEQEMILKSRPEGQKGLSLKETRKMEFLSQVVDETLRVITFSLTAFREAKTDVEMNGYLIPKGWKVLTWFRDVHIDPEVFPDPRKFDPARWDNGFVPKAGAFLPFGAGSHLCPGNDLAKLEISIFLHHFLLKYQVKRSNPECPVMYLPHTRPTDNCLARISYQ

SEQ ID NO: 4028 - protein, 959 aa, Arabidopsis thaliana
MGFLVMIREVSMAKAIRVVLLCVSVLWVVPKECACRSNFSRNSSSSSSSSLRPLRQRPSSVNVGALFTYDSFIGRAAKPAVKAAMDDVNADQSVLKGIKLNIIFQDSNCSGFIGTMGALQLMENKVVAAIGPQSSGIAHMISYVANELHVPLLSFGATDPTLSSLQFPYFLRTTQNDYFQMHAIADFLSYSGWRQVIAIFVDDECGRNGISVLGDVLAKKRSRISYKAAITPGADSSSIRDLLVSVNLMESRVFVVHVNPDSGLNVFSVAKSLGMMASGYVWIATDWLPTAMDSMEHVDSDTMDLLQGVVAFRHYTIESSVKRQFMARWKNLRPNDGFNSYAMYAYDSVWLVARALDVFFRENNNITFSNDPNLHKTNGSTIQLSALSVFNEGEKFMKIILGMNHTGVTGPIQFDSDRNRVNPAYEVLNLEGTAPRTVGYWSNHSGLSVVHPETLYSRPPNTSTANQRLKGIIYPGEVTKPPRGWVFPNNGKPLRIGVPNRVSYTDYVSKDKNPPGVRGYCIDVFEAAIELLPYPVPRTYILYGDGKRNPSYDNLVNEVVADNFDVAVGDITIVTNRTRYVDFTQPFIESGLVVVAPVKEAKSSPWSFLKPFTIEMWAVTGGFFLFVGAMVWILEHRFNQEFRGPPRRQLITIFWFSFSTMFFSHRENTVSSLGRFVLIIWLFVVLIINSSYTASLTSILTIRQLTSRIEGIDSLVTSNEPIGVQDGTFARNYLINELNILPSRIVPLKDEEQYLSALQRGPNAGGVAAIVDELPYIEVLLTNSNCKFRTVGQEFTRTGWGFAFQRDSPLAVDMSTAILQLSEEGELEKIHRKWLNYKHECSMQISNSEDSQLSLKSFWGLFLICGITCFMALTVFFWRVFWQYQRLLPESADEERAGEVSEPSRSGRGSRAPSFKELIKVVDKREAEIKEILKQKSSKKLKSTQSAAGTSQSQHGEIT

SEQ ID NO: 4029 - protein, 721 aa, Arabidopsis thaliana
MFEPNMLLAAMNNADSNNHNYNHEDNNNEGFLRDDEFDSPNTKSGSENQEGGSGNDQDPLHPNKKKRYHRHTQLQIQEMEAFFKECPHPDDKQRKQLSRELNLEPLQVKFWFQNKRTQMKNHHERHENSHLRAENEKLRNDNLRYREALANASCPNCGGPTAIGEMSFDEHQLRLENARLREEIDRISAIAAKYVGKPVSNYPLMSPPPLPPRPLELAMGNIGGEAYGNNPNDLLKSITAPTESDKPVIIDLSVAAMEELMRMVQVDEPLWKSLVLDEEEYARTFPRGIGPRPAGYRSEASRESAVVIMNHVNIVEILMDVNQWSTIFAGMVSRAMTLAVLSTGVAGNYNGALQVMSAEFQVPSPLVPTRETYFARYCKQQGDGSWAVVDISLDSLQPNPPARCRRRASGCLIQELPNGYSKVTWVEHVEVDDRGVHNLYKHMVSTGHAFGAKRWVAILDRQCERLASVMATNISSGEVGVITNQEGRRSMLKLAERMVISFCAGVSASTAHTWTTLSGTGAEDVRVMTRKSVDDPGRPPGIVLSAATSFWIPVPPKRVFDFLRDENSRNEWDILSNGGVVQEMAHIANGRDTGNCVSLLRVNSANSSQSNMLILQESCTDPTASFVIYAPVDIVAMNIVLNGGDPDYVALLPSGFAILPDGNANSGAPGGDGGSLLTVAFQILVDSVPTAKLSLGSVATVNNLIACTVERIKASMSCETA

SEQ ID NO: 4030 - protein, 364 aa, Arabidopsis thaliana
MSSSTKNIPKPPPLPCITYQRFQSSTRKPSSLMRLVPKEALETWDKLFKEGSGADTYVETDNKSHFPAHSSVLAAASPVIATLLNQSRDKNGNTYLKIHGVPCEAVYMFIRFLYSSCYEEEEMKKFVLHLLVLSHCYSVPSLKRLCVEILDQGWINKENVIDVLQLARNCDVTRICFVCLSMVIKDFKSVSSTEGWKVMKRSNPLLEQELIEAVIESDSRKQERRRKLEEREVYLQLYEAMEALVHICREGCGTIGPRDKALKGSHTVCKFPACKGLEGALRHFLGCKSRASCSHCKRMWQLLQLHSCICDDSNSCKVSLCWNFKEKMKKLSKKEQSKWRLLVENIIRARNSLGPFSSRSSGLI

SEQ ID NO: 4031 - protein, 171 aa, Arabidopsis thaliana
MEFSRDAGMMMENKRNVCSLGESSIKRHKSDLSFSSKERKDKVGERISALQQIVSPYGKTDTASVLLDAMHYIEFLHEQVKVCSSIPSMIHSSLSEFPCSFVQVLSAPYLQTVPDATQEELEQYSLRNRGLCLVPMENTVGVAQSNGADIWAPVKTPLSPAFSVTSQSPFR

SEQ ID NO: 4032 - protein, 149 aa, Arabidopsis thaliana
MDHIAAAEEQIVTERIRRKLEEVNATAQSQLSPIQDHINFTLQQAYFKCAYECFDRNRKQEEIANCVEHCSVPVVNAQQHFEGEMSQFQERMNRSLMVCQDKFEAAKLHKNRGDAAKAMESCVNTSIEDSLDTLPHIVQRMKTSFSIAD

SEQ ID NO: 4033 - protein, 734 aa, Arabidopsis thaliana
MGYTLQQILRSICSNTDWNYAVFWKLNHHSPMVLTLEDVYCVNHERGLMPESLHGGRHAHDPLGLAVAKMSYHVHSLGEGIVGQVAISGQHQWIFSEYLNDSHSTLQVHNGWESQISAGIKTILIVAVGSCGVVQLGSLCKVEEDPALVTHIRHLFLALTDPLADHASNLMQCDINSPSDRPKIPSKCLHEASPDFSGEFDKAMDMEGLNIVSQNTSNRSNDLPYNFTPTYFHMERTAQVIGGLEAVQPSMFGSNDCVTSGFSVGVVDTKHKNQVDISDMSKVIYDEETGGYRYSRELDPNFQHYSRNHVRNSGGTSALAMESDRLKAGSSYPQLDSTVLTALKTDKDYSRRNEVFQPSESQGSIFVKDTEHRQEEKSESSQLDALTASLCSFSGSELLEALGPAFSKTSTDYGELAKFESAAAIRRTNDMSHSHLTFESSSENLLDAVVASMSNGDGNVRREISSSRSTQSLLTTAEMAQAEPFGHNKQNIVSTVDSVISQPPLADGLIQQNPSNICGAFSSIGFSSTCLSSSSDQFPTSLEIPKKNKKRAKPGESSRPRPRDRQLIQDRIKELRELVPNGSKCSIDSLLECTIKHMLFLQSVSQHADKLTKSASSKMQHKDTGTLGISSTEQGSSWAVEIGGHLQVCSIMVENLDKEGVMLIEMLCEECSHFLEIANVIRSLELIILRGTTEKQGEKTWICFVVEGQNNKVMHRMDILWSLVQIFQPKATNR

SEQ ID NO: 4034 - protein, 343 aa, Arabidopsis thaliana
MAIRLTHLRKPLAYSRSFDVCIPFFRSISSFEAVEKAIKCAVETKEYLRIPELVVSLKEPYQNSTLFSFLSAFQRHHRIRVIDEILQSFVPVRPRSLPKIVYSSLLTYCLQSSDPLPLSFAILQRTLRSGCLPNPQTHLLLSDAWLERRRGSQSVADIINEMKLIGYSPDTGTCNYLVSSLCAVDKLDEAIKVVEEMSAAGCIPDVESYGAVINSLCLARKTTDVVKIVKEMVSKAGISPRKGMLTKVAAALRANREIWKAIEMIEFVESRDYPVEFESYEVVVEGCLEVREYILAGKVVMRMTDRGFIPYIKVRQKVVERLINIGEWKLACTVRQRVSELRS

SEQ ID NO: 4035 - protein, 602 aa, Arabidopsis thaliana
MKQIRRWQRILILALLSISVFAPLIFVSNRLKSITPVGQFRLLSFLFSFHCRREFIEELSKIRFTTNDLRLSAIEHEDGEGLKGPRLILFKDGEFNSSAESDGGNTYKNREEQVIVSQKMTVSSDEKGQILPTVNQLANKTDFKPPLSKGEKNTRVQPDRATDVKTKEIRDKIIQAKAYLNFAPPGSNSQVVKELRGRLKELERSVGDATKDKDLSKGALRRVKPMENVLYKASRVFNNCPAIATKLRAMNYNTEEQVQAQKNQAAYLMQLAARTTPKGLHCLSMRLTSEYFSLDPEKRQMPNQQNYFDANFNHYVVFSDNVLASSVVVNSTISSSKEPERIVFHVVTDSLNYPAISMWFLLNIQSKATIQILNIDDMDVLPRDYDQLLMKQNSNDPRFISTLNHARFYLPDIFPGLNKMVLLDHDVVVQRDLSRLWSIDMKGKVVGAVETCLEGESSFRSMSTFINFSDTWVAGKFSPRACTWAFGMNLIDLEEWRIRKLTSTYIKYFNLGTKRPLWKAGSLPIGWLTFYRQTLALDKRWHVMGLGRESGVKAVDIEQAAVIHYDGVMKPWLDIGKENYKRYWNIHVPYHHTYLQQCNLQA

SEQ ID NO: 4036 - protein, 326 aa, Arabidopsis thaliana
MATEATTVPKFQEPDLRQVSQTPDFKPEIAHDGLKFWQFMIAGSIAGSVEHMAMFPVDTIKTHMQALRPCPLKPVGIREAFRSIIQKEGPSALYRGIWAMGLGAGPAHAVYFSFYEVSKKYLSAGDQNNSVAHAMSGVFATISSDAVFTPMDMVKQRLQMGEGTYKGVWDCVKRVLREEGIGAFYASYRTTVLMNAPFTAVHFATYEAAKKGLMEFSPDRISDEEGWLVHATAGAAAGGLAAAVTTPLDVVKTQLQCQGVCGCDRFTSSSISHVLRTIVKKDGYRGLLRGWLPRMLFHAPAAAICWSTYEGVKSFFQDFNVDSNTA

SEQ ID NO: 4037 - protein, 534 aa, Arabidopsis thaliana
MRSIIALMRQREYFVQAIRRTTCVASPALNQTNFQASSFLTTLISSKKSPEETCIGSEEEEEEPNKCLSLRIEKLPKGVTVGSALQSWMGDGFPVHGGDVYHAINRLRKLGRNKRALELMEWIIRERPYRLGELEYSYLLEFTVKLHGVSQGEKLFTRVPQEFQNELLYNNLVIACLDQGVIRLALEYMKKMRELGYRTSHLVYNRLIIRNSAPGRRKLIAKDLALMKADKATPHVSTYHILMKLEANEHNIDGVLKAFDGMKKAGVEPNEVSYCILAMAHAVARLYTVAEAYTEEIEKSITGDNWSTLDILMILYGRLGKEKELARTWNVIRGFHHVRSKSYLLATEAFARVGNLDRAEELWLEMKNVKGLKETEQFNSLLSVYCKDGLIEKAIGVFREMTGNGFKPNSITYRHLALGCAKAKLMKEALKNIEMGLNLKTSKSIGSSTPWLETTLSIIECFAEKGDVENSEKLFEEVKNAKYNRYAFVYNALFKAYVKAKVYDPNLFKRMVLGGARPDAESYSLLKLVEQYKP

SEQ ID NO: 4038 - protein, 217 aa, Arabidopsis thaliana
MTPLLWFCFKILIFDSNLQISHCSYHGYSGLTSRGGINTVENHRWVWHNNGVRLSFPRAESSINITMGCTLQRGIAKSLSQENLVELSDENDDLCPVECVTEFKTDDELLSVLEKSKETNSLVVVDFYRTACGSCKYIEQGFSKLCKQSGDQEAPVIFLKHNVVDEYDEQSEVAERLRIKAVPLFHFYKNGVLLESFATRDKERIDAAILKYTSSES

SEQ ID NO: 4039 - protein, 275 aa, Arabidopsis thaliana
MSTGISTDLHVHFGALNFSKTYKSGLSNRTVSFSRVGYAQNRKLSCSVSNTENVAPKDDERGKDRPLVKMCGITSARDAAMAVEAGADFIGMIIWPHSKRSISLSVAKDISKVAREGGAKPVGVFVEDDENTILRAADSSDLELVQLHGNGSRAAFSRLVRKRRVIYVLNANQDGKLLNEVPEEDCHLADWILVDSATGGSGHGFNWAQFKLPSVRSRNGWLLAGGINPTNVSEALSILQPDGIDVSSGICGTDGIQKDKSKISSFITAVRSVHY

SEQ ID NO: 4040 - protein, 146 aa, Arabidopsis thaliana
MTLGARLVAPMIILLLFIPIELVKAEVITLTPETFSDKIKEKDTAWFVKFCVPWCKHCKKLGNLWEDLGKAMEGDDEIEVGEVDCGTSRAVCTKVEIHSYPTFMLFYNGEEVSKYKGKRDVESLKAFVVEETEKAAEKAQLEDKEL

SEQ ID NO: 4041 - protein, 500 aa, Arabidopsis thaliana
MQMNSVWKLSLGLLLLSSVIGSFAELDFGHCETLVKKWADSSSSREEHVNKDKRSLKDLLFFLHVPRTGGRTYFHCFLRKLYDSSEECPRSYDKLHFNPRKEKCKLLATHDDYSLMAKLPRERTSVMTIVRDPIARVLSTYEFSVEVAARFLVHPNLTSASRMSSRIRKSNVISTLDIWPWKYLVPWMREDLFARRDARKLKEVVIIEDDNPYDMEEMLMPLHKYLDAPTAHDIIHNGATFQIAGLTNNSHLSEAHEVRHCVQKFKSLGESVLQVAKRRLDSMLYVGLTEEHRESASLFANVVGSQVLSQVVPSNATAKIKALKSEASVTISETGSDKSNIQNGTSEVTLNKAEAKSGNMTVKTLMEVYEGCITHLRKSQGTRRVNSLKRITPANFTRGTRTRVPKEVIQQIKSLNNLDVELYKYAKVIFAKEHELVSNKLISSSKRSIVDLPSELKSVLGEMGEEKLWKFVPVALMLLLIVLFFLFVNAKRRRTSKVKI

SEQ ID NO: 4042 - protein, 1479 aa, Arabidopsis thaliana
MEANEESLKGKIEKLEGKEVIVESKEDEMDIIIEENREAEQEVMEVKARDGRGEQNDVLMEENNNQGEQKDEEMQDASSRSESSDFNSDEDEQILSRRDDELDLEKPLSEEEIDELISDLLAVESKAAEAQEALEKESLSKVESEVREELAQALRGDELDEAVAAEMMTFKDEWEATLDELETESATLLEQLDGAGIELPKLYEMIESQAPNGCYTEAWKQRAHWVGTQVTKETVESLANAERFLHTHRPVRKRHGKLLEEGASGFLEKKLADGAVKESLAGTSELDWSSLNKVFSEKRDESVSFGSKQWASVYLASTPHQAAAMGLEFPGVNEVEEIEEIDASLADPFLADAIDNERELALTEEQKTNYIRVKEEDDITCDRVLQLRLKRKRRKKRSKQVIRCAAENMDDDSVYLDGNNTTPNFAKDQVKSPETSTQVHNSEVNIEENGNFSNSDVDKMTPSTHINVDAKRDDSQNPANNFRCTACNKVAVEVHSHPLLEVIVCMDCKRSIEDRVSKVDDSLERHCEWCGHIADLIDCRTCEKLFCASCIKRNIGEEYMSEAQSSGWDCCCCSPIPLQRLTLELEKAMRDKKSIELSSDSSSDSSSDNNSVDTDADVNVTISSKKKSKKKIRRIIDDAELGKDTRTKIAIEKARQERLRSLQFSARYKTISSMGDVKSIPEGAEVEVLGDAHSGYIVNVVREIGEEAVRVPRSISAKLKVHQVTGIRFMWENIIQSISRVKSGDKGLGCILAHTMGLGKTFQVIAFLYTAMRCVDLGLKTALIVTPVNVLHNWRSEFEKWMPSEVKPLRIFMLGDVSRERRFDLLTKWRKKGGVFLMGYTNFRNLSLGRGVKDLNAARGICNALRDGPDILVCDEAHIIKNTKADTTQALKQVKCQRRIALTGSPLQNNLMEYYCMVDFVREGFLGSSPEFRNRFQNPIENGQHMNSTAEDVKIMNQRSHILYEQLKGFVQRMDMNVVKKDLPPKTVFVISVKLSPLQRILYQRFLELYGFSDGRTDERMRKNFFAAYQVLAQILNHPGIPQLRSEDSKNGRRGSIVDIPDDCSSDENIDYNMVTGEKQRTMNDLQDKVDGYLQKDWWVDLLQKNNYKVSDFSGKMILLLDILSMSADVGDKALVFSQSIPTLDLIELYLSRVPRHGKQGKFWKKGKDWYRIDGKTESSERQKLVDRFNEPDNKRVKCTLISTRAGSLGINLYAANRVIIVDGSWNPTYDLQAIFRAWRYGQKKPVFAYRLMARGTIEEKIYKRQVTKEGLAARVVDRQQVHRTISKEEMLHLFEFDDDDEKSEAVTEISKQNEAGHSNLVEQAILWTKKATLSRVGGDKLMENLLQRHGPNWISSFHEHETLLQENEEERLTKEEKDMAWEVYRRALEWEEVQRVPFSESPVVPKPSPSTQTEPLPQPKGFNRSRFVNRNCTRIAHQLTLISQGLKVGSSTVCGECGRVIRWEDVIPASKLSAVIVN

SEQ ID NO: 4043 - protein, 1209 aa, Arabidopsis thaliana
MGTELMRICVKEDSDDLPSVPPGFESYATFTLKRVVPATTSDKAKTPAIESVSATEQAKMEVESDEAKAARALRRRPWINHSGCDDDGDCAANNDNAASQNPDQNCDVKPALPKGVVRGCEECKDCQKVTARWHPDEARRPDLEDAPVFYPSEEEFEDTLNYIAKIRPEAEKYGICRIVPPPSWKPPCPLKEKQVWEGSKFTTRVQRVDKLQNRSSMKKISKLPNQMRKKKRKCMKMGMDSVTNGMGDPCSASTGMNELETFGFEPGPGFTLKDFQKYADEFKAQYFKKSETSTDDKCKVDNSIDCWEPALEDVEGEYWRIVDKATEEIEVLYGADLETGVFGSGFPKISSSHNASSSEDKYAKSGWNLNNFPRLPGSLLKYEGSDISGVLVPWLYIGMCFSSFCWHVEDHHLYSLNYMHWGAPKLWYGVGGKDAVKLEEAMRKHLPDLFEEQPDLLHKLVTQLSPSKLKTAGVPVHRCVQHAGEFVLTFPRAYHAGFNSGFNCAEAVNVAPVDWLPHGQIAIELYCQQGRKTSISHDKLLLGAAREVVKADWELNLLRKNTVDNLRWKAFSAKDGILAKTLKARIDMERTRREFLCNSSLALKMHSNFDATNERECCICFFDLHLSAAGCRCSPEKYSCLTHVKELCSCPWVTKYFLFRYDIDELNVLVEAVEGKLSSVYRWARQDLGLALSTDVSGSKMEIDEEGKVHKDPTPQTTALSGKDLQLKVTSKEVSKELEKTSKLSHVNLLLKEKEEQITSSHCMKPVKEETVCDSSDPNVSACQPSEGGIICMTAVKSASGKKNSQSLPNDVILLSDDEYDIPRKRGSVRRDAISSGKKLEIRERPTHVLALEASAKIAAPICQREGDSLRDTRNTISLPTNDQKTMRRDVPSSTSHAEVNAEATGLTQDICNRMATNSHGGGKPTSCKSKNSGGLAIVDVVDGTRSSSGTPSCSQNNSPDRFIRQKGPRIAKVVRRINCNVEPLSYGCVLSGKSWCSRRAIFPKGFRSRVKYINILDPTNMCFYISEILDAGRNSPLFMVYLESNPSEVFVHMSPTRCWEMVRERVNQEITKQHKAGKSDLPPLQPSGSPDGFEMFGYSSPAIVQAIEALDVNRVCTDYWDSRPYSRPQVQFPANPLLREANTSGRSNVGNLQLNPGHHISPTGINSILKVLFKKASMEELSSLQEVLSETNSDMVTELVKEEIQNRR

SEQ ID NO: 4044 - protein, 386 aa, Arabidopsis thaliana
MNMPLLDIQPRTLQFAVDLKKQTSCVVQLTNTTHHYVAFKVKTTSPKKYCVRPNVGVVAPKSTCEFTVIMQAFKEPPPDMVCKDKFLIQSTAVSAETTDEDITASMFSKAEGKHIEENKLRVTLVPPSDSPELSPINTPKQGAVFEDSILKDRLYSQSETLAPPQYEGEIVKEPRMVGHDELKAADNAKELKTPKMATVDFVEDRYTANDLKATKDSYDSSRMAKETGFDPIRSHKDADDGRAIKATTNLDAPMKKAMDLPRDQGFTNGIAVDSEPKISKERDVVQLQKTDGQNVRGLDELKLVKDIEEMKLKVDALESKLKQADSTISKLMEERSISSQHRQSLQHELAELRTKKIVKEVHNGFPLLYVCVVAFIAYVIGHFLRT

SEQ ID NO: 4045 - protein, 193 aa, Arabidopsis thaliana
MFLFDWFYGILASLGLCKKEAKILFLGLDNAGKTTLLHMLKDERLVQHQPTQHPTSEELSIGKINFKAFDLGGHQIARRVWKDCYAKVDAVVYLVDAYDRDRFVESKRELDALLSDEALANVPCLILGNKIDIPYASSEDELRYYLGLTNFTTGKGIVNLEDSGVRPLEVFMCSIVRKMGYGEGFKWLSQYIK

SEQ ID NO: 4046 - protein, 493 aa, Arabidopsis thaliana
MQFLARNLVRRVSRTQVVSRNAYSTQTVRDIGQPTPASHPHLMAEGEVTPGIRIEEYIGRRKKLVELLPENSLAIISSAPVKMMTDVVPYTFRQDADYLYLTGCQQPGGVAVLSDERGLCMFMPESTPKDIAWEGEVAGVDAASEVFKADQAYPISKLPEILSDMIRHSSKVFHNVQSASQRYTNLDDFQNSASLGKVKTLSSLTHELRLIKSPAELKLMRESASIACQGLLKTMLHSKGFPDEGILSAQVEYECRVRGAQRMAFNPVVGGGSNASVIHYSRNDQRIKDGDLVLMDMGCELHGYVSDLTRTWPPCGKFSSVQEELYDLILQTNKECIKQCKPGTTIRQLNTYSTELLCDGLMKMGILKSRRLYHQLNPTSIGHYLGMDVHDSSAVGYDRPLQPGFVITIEPGVYIPSSFDCPERFQGIGIRIEDDVLITETGYEVLTGSMPKEIKHIETLLNNHCHDNSARTSPVSLCKVKGLHTNRNPRRLF

SEQ ID NO: 4047 - protein, 421 aa, Arabidopsis thaliana
MASSGLGNGVGTSRSAKGLKSSSSSVDWLTRDLAETRIRDKVETDDERDSEPDIIDGAGAEPGHVIRTTLRGRNGQSRQTVSYISEHVVGTGSFGMVFQAKCRETGEVVAIKKVLQDKRYKNRELQIMQMLDHPNAVALKHSFFSRTDNEEVYLNLVLEFVPETVNRVARSYSRTNQLMPLIYVKLYTYQICRALAYIHNSFGLCHRDIKPQNLLVNPHTHQLKICDFGSAKVLVKGEPNVSYICSRYYRAPELIFGASEYTTAIDIWSTGCVMAELLLGQPLFPGESGVDQLVEIIKVLGTPTREEIKCMNPNYTEFKFPQIKPHPWHKVFQKRLPPEAVDLLCRFFQYSPNLRCTALEACIHPLFDELRDPNTRLPNGRPLPPLFNFKPQELSGIPPEIVNRLVPEHARKQNLFMALHS

SEQ ID NO: 4048 - protein, 366 aa, Arabidopsis thaliana
MGGESNEGGEMGFKHGDDESGGISRVGITSMPLYAKADPFFSSADWDPVVNAAAAGFSSSHYHPSMAMDNPGMSCFSHYQPGSVSGFAADMPASLLPFGDCGGGQIGHFLGSDKKGERLIRAGESSHEDHHQVSDDAVLGASPVGKRRLPEAESQWNKKAVEEFQEDPQRGNDQSQKKHKNDQSKETVNKESSQSEEAPKENYIHMRARRGQATNSHSLAERVRREKISERMRLLQELVPGCNKITGKAVMLDEIINYVQSLQQQVEFLSMKLATVNPEINIDIDRILAKDLLQSRDRNTPTLGLNPFAGFQGNIPNLSATTNPQYNPLPQTTLESELQNLYQMGFVSNPSTMSSFSPNGRLKPEL

SEQ ID NO: 4049 - protein, 179 aa, Arabidopsis thaliana
MASMHEALFSSRLLQVNSSFSFRCALPIISSPAAVSCAIKSTQFFKQRCRTKVRDFSLSSLSRRGFVCRAAEYKFPDPIPEFAEAETEKFRDHMLNKLSKRDLFEDSVDEIVGVCTEIFETFLRSEYGGPGTLLVIPFIDMADTLNERELPGGPQAARAAIKWAQDHVDKDWKEWTGTD

SEQ ID NO: 4050 - protein, 339 aa, Arabidopsis thaliana
MLSGNNGNTAPPVFMNENQLQYQTNLRSNQLHLLGNMGGGCTVDPVNYFANDNLVPMIRPNKRGREAESISNNIQRQQQKLQMSLNYNYNNTSVREEVPKENLVSTGLRLSYDDDEHNSSVTSASGSILAASPIFQSLDDSLRIDLHRQKDEFDQFIKIQAAQMAKGVRDMKQRHIASFLTTLEKGVSKKLQEKDHEINDMNKKNKELVERIKQVAMEAQNWHYRAKYNESVVNVLKANLQQAMSHNNSVIAAADQGKEGFGDSEIDDAASSYIDPNNNNNNNMGIHQRMRCKMCNVKEVSVLIVPCRHLSLCKECDVFTKICPVCKSLKSSCVQVFFS

SEQ ID NO: 4051 - protein, 473 aa, Arabidopsis thaliana
MIKLWMMTSLQLAELFVSSIVHLLYGFYIFSSAVAGDISQTLNDYLFKSNVAFGETGQNQTNVEGLPPIVLVHGIFGFGKGRLGGLSYFGGAEKKDERVLVPDLGSLTSIYDRARELFYYLKGGVVDFGEEHSEACGHSRFGRRYEQGQYPEWDEDHPIHFVGHSAGAQVVRVLQQMLADQAFEGFEETNENWVLSVTSLSGAFNGTTRTYLDGMRTDDGVSMKPICLLQLCRIGVIMYDWLDISWLKTYYNFGFDHFNISWKKTGVRGLVDCLMGNAGPFASGDWILPDLTIQGSTSINSNLQTFPNTYYFSYATKRTRRVMGMTIPSGVLGIHPMLFLRVFQMSQWKFPQDVSPPYKGYRDEDWQENDGALNTISMTHPRLPVEHPSRFIRSDSECQTLQPGIWYYKIVEADHIMFIVNRERAGVQFDLIYDSIFQRCRKHVFRKIPQTLPNQSPSSPRSSSSPRINNFVH

SEQ ID NO: 4052 - protein, 438 aa, Arabidopsis thaliana
MIHGLPSMKSIKSLKSLVKRKTNAQEVSKSGWKMKPFLALMCTALLIFWYKTTNIQFEQTEIEETDYPFDMAKESEAVNDKLKGLPRGIIQSRSDLELKPLWSRGSLRSKGVEMTNRNLLAIPVGLKQKGNVDALVKKFLPANFTIVLFHYDGNMDKWWDLEWSSKSIHIVAQNQTKWWFAKRFLHPDVVSIYDYIFLWDEDLGVENFNPERYLKIVKSVGLEISQPALDHNSTEIHHKITLRSKTKKFHRRVYINRGHKRCSNTSSDPPCTGFVEGMAPVFSKAAWLCTWNLIQNDLVHGWGMDMKLGYCAQGDRTKNVGIVDSEYILHQGIQTLGESVPEKKKTARDVGTRRQGHTTFDSRTEIRRQSTWELQTFKERWSKAVEEDIKWIDPSSSSSMTKRKSNGNNRRLRRGSSSSHRVKHKRSQETSRTTTTHK

SEQ ID NO: 4053 - protein, 312 aa, Arabidopsis thaliana
MLKRDCSSVVGSERERDGSSLALKRHCSSVVKLLLPHDVVGLILERLPVESLLRFKCVSNQWKSTIESQCFQERQLIRRMESRGPDVLVVSFADDEDKYGRKAVFGSSIVSTFRFPTLHTLICYGSCEGLICIYCVYSPNIVVNPATKWHRSCPLSNLQQFLDDKFEKKEYDFPTPKLAFGKDKLNGTYKQVWLYNSSEFRLDDVTTCEVFDFSNNAWRYVHPASPYRINDYQDPVYSDGSVHWLTEGKESKILSFHLHTETFQVLCEAPFLRERDPVGDSMCILDNRLCVSEINGPAQLIWSLDSSGGNKC

SEQ ID NO: 4054 - protein, 301 aa, Arabidopsis thaliana
MAISSFILVPIAYFLERKIIPKITFRLMVDHFISGLLGASLMQFFYLLGLSYTSATVACALVSLMPAITFAFALILRTEKIKDLKTQAGMIKVMGTLICISGALFLTFYKGPHISNSHSHLEALPHNNSDHNTKNWLLGCLYLVIGIVLLSLWILFQGTLSIKYPCKFSSTCLMSIFAAFQCALLSLYKSRDLKHWIIDDGFVIGVIIYAGVIGQAMSTVAATWGINRLGAVFASAIMPVSLISATLFDFLILHTPLYLGSVIGSVGTIIGLYVFLWGKNKETEADITTLSSRMNNEDQRV

SEQ ID NO: 4055 - protein, 254 aa, Arabidopsis thaliana
MDSNQSMRLLSAWIGQIGDLGLNLLWRFIHIVVSLWYIVSGIFEAIESYAITLGLNKKYGSIDLEKLRCLAVVVDIEAAQDVANVVELLQWLTTIGVKQVGLFDSQGLLKKSKDLILETVPGSMLLEEIEKDVAPDGKRIALEFISSSDNKEAVMKAANILLQRYLKSSHPEDDKGEDFFTESHLNDALRVVGENVHVPDLLLVYGPIRSHLGFPAWRLRYTEIVHMGTLKYMRYGSLLKAIHKFTGVHQNYGT

SEQ ID NO: 4056 - protein, 392 aa, Arabidopsis thaliana
MALRCFPIWVCPQTTHHRSPLMGLAEFDADKRRRFCLWECSSSASQRAVTAIEGEIPFSRELKKSSDELGLTQETQSLSFHRDLSMLPKPLTANSLYSSDGDDSKVRISFQGIPGAYSETAALKAFPNCETVPCEQFEAAFQAVELWLVDKAVLPIENSVGGSIHRNYDLLLRHRLHIVQEVHLPVNHCLLGVPGVKKEDIKCVLSHPQALDQCVNSLNNLGIQRISAKDTATAAQTVSSSGKIDVGAIASVRAANIYGLDILAENIQDDVNNVTRFLILAREPMIPRTDRPYKTSIVFSLEEGPGVLFKALAVFALRSINLSKIESRPQRRRPLRVVDGSNNGSAKYFDYLFYIDFEASMADTRAQHALGHLQEFASFIRILGCYPMDLVR

SEQ ID NO: 4057 - protein, 395 aa, Arabidopsis thaliana
MNSFSHVPPGFRFHPTDEELVDYYLRKKVASKRIEIDFIKDIDLYKIEPWDLQELCKIGHEEQSDWYFFSHKDKKYPTGTRTNRATKAGFWKATGRDKAIYLRHSLIGMRKTLVFYKGRAPNGQKSDWIMHEYRLETDENGTPQEEGWVVCRVFKKRLAAVRRMGDYDSSPSHWYDDQLSFMASELETNGQRRILPNHHQQQQHEHQQHMPYGLNASAYALNNPNLQCKQELELHYNHLVQRNHLLDESHLSFLQLPQLESPKIQQDNSNCNSLPYGTSNIDNNSSHNANLQQSNIAHEEQLNQGNQNFSSLYMNSGNEQVMDQVTDWRVLDKFVASQLSNEEAATASASIQNNAKDTSNAEYQVDEEKDPKRASDMGEEYTASTSSSCQIDLWK

SEQ ID NO: 4058 - protein, 793 aa, Arabidopsis thaliana
MATTNAHTATQQTPPPPPPPPPAPAPPAMDGLTTDELTAKALNKRYEGLMTVRTKAVKGKGAWYWTHLEPILVRNTDTGLPKAVKLRCSLCDAVFSASNPSRTASEHLKRGTCPNFNSVTPISTITPSPTSSSSSPQTHHRKRNSSGAVTTAIPSRLNPPPIGGSYHVTPITVVDPSRFCGGELHYSTPPPPQHLMLSGGKDDLGPLAMLEDSVKKLKSPKPSQTQSLTRSQIESALDSLSDWVFESCGSVSLSGLEHPKFRAFLTQVGLPIISKRDFATTRLDLKHEEARAEAESRIRDAMFFQISSDGWKPGESGESLVNLIVNLPNGTSLYRRAVLVNGAVPSNYAEEVLLETVKGICGNSPQRCVGIVSDKFKTKALRNLESQHQWMVNLSCQFQGLNSLIKDFVKELPLFKSVSQNCVRLAKFINNTAQIRNAHCKYQLQEHGESIMLRLPLHCYYDDERRSCSSSSSGSNKVCFYEPLFNLLEDVLSSARAIQLVVHDDACKVVLMEDHMAREVREMVGDEGFWNEVEAVHALIKLVKEMARRIEEEKLLVGQCLPLWDELRAKVKDWDSKFNVGEGHVEKVVERRFKKSYHPAWAAAFILDPLYLIRDSSGKYLPPFKCLSPEQEKDVDKLITRLVSRDEAHIALMELMKWRTEGLDPMYARAVQMKERDPVSGKMRIANPQSSRLVWETYLSEFRSLGKVAVRLIFLHATTGGFKCNSSLLKWVNSNGRSHAAVDRAQKLIFISANSKFERRDFSNEEDRDAELLAMANGDDHMLNDVLVDTSSV

SEQ ID NO: 4059 - protein, 168 aa, Arabidopsis thaliana
MGSEQNDSTSFSPSEPKLCVKGCGFFGSPSNMNLCSKCYRDIRATEEQTASAKAAVEKSLNPNKPKTQPQQSQEITQGVLGSGSSSSSTRGGDSAAAPLDPPKSTATRCLSCNKKVGVTGFKCRCGSTFCGTHRYPESHECQFDFKGVAREAIAKANPVVKADKVDRI

SEQ ID NO: 4060 - protein, 320 aa, Arabidopsis thaliana
MASILRSVATTSAVVAAASAIPIAIAFSSSSSSSSTNPKSQSLNFSFLSRSSPRLLGLSRSFVSSPMATALTSDRNLHQEDRAMPQLLTEFMVDMTCEGCVNAVKNKLETIEGIEKVEVDLSNQVVRILGSSPVKAMTQALEQTGRKARLIGQGVPQDFLVSAAVAEFKGPDIFGVVRFAQVSMELARIEANFTGLSPGTHSWCINEYGDLTNGAASTGSLYNPFQDQTGTEPLGDLGTLEADKNGEAFYSGKKEKLKVADLIGRAVVVYKTDDNKSGPGLTAAVIARSAGVGENYKKLCSCDGTVIWEATNSDFVASKV

SEQ ID NO: 4061 - protein, 767 aa, Arabidopsis thaliana
MDVLALSSSASAAAPSASLAGKFLSFPSRVRVRRNRENLLAKQKKFLVSASKREEPKLNEWDQMELNFGRLLGEDPKLTLAKIVARKVDPEASFIDIEKSFYKNKGKIPEVEEIPLDWSKDNKKKSTSSLDGLKLVKPVLKDGVKFERPVMKKPSPVLKKPLVEAVAAPKVQRLPNVILRKPSSFYTSNGDDEESKLRLKPNLTLKMRNERENERFSDMTLLRKPEPVSVVAEEEDKPLSDDLTMEEGEQEGGTYSQYTLLEKPEARLQPVNVEEEVGDSGGVESSEIVNNSIQKPEARPELENIEKEVADSGVLESSEIENNSIPTEMQLNSEMSSEEKTINSDPLERIPSKPISQTIVEASLQGKPQRLDPSSAEPSVPNIGKPSVVNHEGRQVSVELKGPPTRSSLEENDWNKAESLVKTELRADVELISSSTRGFAVSYGSLIGFLPYRNLAAKWKFLAFESWLRRKGVDPSPYRQNLGVIGGQDVTSKSPSPDSSLDSEVATTINGEVSSDMKLEDLLMVYDREKQKFLSSFVGQKIKVNVVMANRNSRKLIFSMRPRENEEEVEKKRTLMAKLRVGDVVKCCIKKITYFGIFCELEGVPALVHQSEVSWDATLDPASYFKIGQIVEAKVHQLDFALERIFLSLKEITPDPLTEALESVVGGDNDQLGGRLQAAELDAEWPDVESLIKELEMVEGIQSVSKSRFFLSPGLAPTFQVYMAPMFENQYKLLARAGNRVQELIVEASLSKEEMKSTIMSCTNRVE

SEQ ID NO: 4062 - protein, 399 aa, Arabidopsis thaliana
MASATFSVAKPSLQGFSEFSGLRNSSALPFAKRSSSDEFVSFVSFQTSAMRSNGGYRKGVTEAKIKVAINGFGRIGRNFLRCWHGRKDSPLDVVVINDTGGVKQASHLLKYDSTLGIFDADVKPSGDSALSVDGKIIKIVSDRNPSNLPWGELGIDLVIEGTGVFVDRDGAGKHLQAGAKKVLITAPGKGDIPTYVVGVNAELYSHEDTIISNASCTTNCLAPFVKVLDQKFGIIKGTMTTTHSYTGDQRLLDASHRDLRRARAAALNIVPTSTGAAKAVALVLPNLKGKLNGIALRVPTPNVSVVDLVVQVSKKTFAEEVNAAFRDAAEKELKGILDVCDEPLVSVDFRCSDVSSTIDSSLTMVMGDDMVKVIAWYDNEWGYSQRVVDLADIVANNWK

SEQ ID NO: 4063 - protein, 392 aa, Arabidopsis thaliana
MWWMMGEAGGHYCSKKTDDICGGVCSQEPGRFFSFSRLCCALRGVDMKTYIFLLVIVPTCVLAGYVHGQKISYFLRPLWESPPKPFHDIPHYYHENASMETLCKLHGWGVRDYPRRVYDAVLFSNELDILAVRWRELFPYITQFVLLESNTTFTGLPKPLVFAAHRDEFKFIESRLTYGTVGGRFVKGQNPFYEEAYQRVALDQLLRIAGITDDDLLLMSDVDEIPSRHTINLLRWCDEIPKILHLRLKNYLYSFEFLVDNKSWRASIHRYETGKTRYAHYRQSDEILADAGWHCSFCFRRISEFIFKMKAYSHNDRVRFGHFLNPKRVQRVICKGADLFDMLPEEYTFKEIIGKMGPIPHSFSAVHLPSYLLENADKYRFLLPGNCIRESE

SEQ ID NO: 4064 - protein, 611 aa, Arabidopsis thaliana
MGIVLEPPCPKSVDGISIDPEPNWNFESLVAEIASVEKKLNGFSMYPQPITNTTLRMGRRGGGFVMHVSEDEMESDEGEESDDEEEEEDHSQICTAGKRFACDELYLSDESDEEFDHEPEYMMNKLGLAESALYEVINDHQTEIKDDIRNQVSVVETEIMNEIETSLSAIARVEKYSETRKEVERKLDLQYQRKVAEALDTHLTAVQREHKIKSQIEERKIRSEEAQEEARRKERAHQEEKIRQEKARAEAQMLAKIRAEEEKKEVERKAAREVAEKEVADRKAAEQKLAEQKAVIESVTGSSATSNAQAGGNSIRAAESALILENHRLKKLEELETTNQSLKSRSNENFSSFEKHIGRVIRQISGTKDSVSGKINDIVKIFKDPRCPVSISIAAFAKKMVTTKEKPNPFACSYVIVYINSQFPQVMDILLAEFHKACIYTVPKHIVNSQSAWDSDAYERLDSIMRLYGALVQTDIRVGNATNVHGIEHGWAWLARFLNKIPANRATATALNSFLQTAGFGLHQRYKSQFLKVVNVVREHFLQKLRAKKDTSDLLVIIAEITAYLDDRMYLKEPEGRAMKTTSTLSSELTAELNQPNYNQNYQRNDYRNYY

SEQ ID NO: 4065 - protein, 260 aa, Arabidopsis thaliana
MYNQLAISSSSSSSSYYESLKVLEADVQHANSLAEAIPMGKNNVRLQMKLVHSNFASLLLFLLRWIDLSSSCLIPRYLNLFHVLVYKVQSDGQPKLTTHGRKATISEFYGVILPSLQLLHSNLDELETTDIGFDLKRLSKKITKEARSSRFSNAGLEREEECGICLETCTKMVLPNCCHSMCIKCYRNWNLKSQSCPFCRGSMKRVNSEDLWVLAGDNDVVDTRTASREDLFRFYLYINSLPKDYPEALFVVYYEYSNLL

SEQ ID NO: 4066 - protein, 136 aa, Arabidopsis thaliana
MARTKQSARKSHGGKAPTKQLATKAARKSAPTTGGVKKPHRFRPGTVALREIRKYQKSTELLNRKLPFQRLVREIAQDFKTDLRFQSHAVLALQEAAEAYLVGLFEDTNLCAIHAKRVTIMPKDVQLARRIRAERA

SEQ ID NO: 4067 - protein, 492 aa, Arabidopsis thaliana
MWKQILSKLPKKSSSKNHSSSSSSTSKSSDNGASKSGNSQTQNAPPVKPSADSGFKEGNLKGNGNGFTPYEALPGFKDVPNAEKQNLFVRKLSLCCVVFDFSDPTKNVKEKDIKRQTLLELVDYVASPNGKFSETVIQEVVRMVSVNIFRTLNPQPRENKVIDALDLEEEEPSMDPTWPHLQLVYEILLRLIASPETDTKLAKKYIDQSFVSRLLDLFDSEDPRERDCLKTVLHRIYGKFMVHRPFIRKSINNIFYRFVFETEKHNGIAEFLEILGSIINGFALPLKDEHKVFLVRALVPLHKPKSLQMYHQQLSYCITQFVEKDCKLADTVIRGLLKSWPVTNSSKEVMFLNELEEVLEATQPPEFQRCMVPLFRQVARCLNSLHFQVAERALFLWNNDHIENLIMQNRKVILPIIFPALERNTQKHWNQAVHSLTLNVQKIFNDIDAELFKDCLAKFREDESKEAEIGAKREATWKRLEEIGNQKQKSSL

SEQ ID NO: 4068 - protein, 622 aa, Arabidopsis thaliana
MAMAVFKAPLKGEFHGARKMEGKQYKHHLLQQQSTGRRRVFVQTDTGCVLGVELDRNDNVHTVKKRLQIAFNFPTEESSLTFGDMVLKNDLSAVRNDSPLLLKRNLMHRSSSTPCLSPTGNDLQRKDRSGPIEILSHSPCFLSLKQTANDIVKAMKMGVEPIPVNGGLGGAYYFRDEKGQSVAIVKPTDEEPFAPNNPKGFVGKALGQPGLKPSVRVGETGFREVAAYLLDYDHFANVPPTALVKITHSVFNVNDGMDGNKSREKKKLVSSKIASFQKFVPHDFDASDHGTSSFPVASVHRIGILDIRILNTDRHGGNLLVKKLDDGGVGRFGQVELIPIDHGLCLPETLEDPYFEWIHWPQASIPFSEEELDYIQSLDPVKDCEMLRRELPMIREACLRVLVLCTVFLKEAAVFGLCLAEIGEMMTREFRAGEEEPSELEMLCIEAKRLTTEQDVLSPKSDGEGETEFQFDIDYNELDSVYGSETETDEFFAKNPFSNGRSSLGELKESIAEEEEDDEEEAKLTLSLSKLSTSMKNNLSNTMGSGYLKPPKDNQTDKALVSHKSANVQLPLSVNFVKLADMKEVEWVVFLERFQELLYSAFAERKTMTLRNTQRLGTSCKF

SEQ ID NO: 4069 - protein, 603 aa, Arabidopsis thaliana
MKVASVIGLRPRISGLLFLTLGVIALITILVPNSDSSSTTSTTRVPPSNIYSNYGRVKEQAAVDYLDLRFFSLGVNRLKEFPLCGKERDNYVPCYNVTESDRNCEFAREEERCLVRPPRDYKIPLRWPVGRDIIWTGNVKITKDQFLSSGTMTKRLMLLEENQITFHSDDGLIFDGVKDYAFQIAEMIGLGSDTEFPQAGIRTVLDIGCGFGSFGAHLVSLNVMPICIAEYETSGSQVQLALERGLPAMIGNFFSKQLPYPALSFDMVHCAQCGITWDIKDAMLLLEVDRVLKPGGYFVLTSPTSKAQGNSPDTKKTSISTRVDELSKKICWSLSGQQDETFLWQKTADPNCYSSRSQASIPVCKDDDSVPYYHPLVPCISGTKSKRWIPIQNRSRASGTSLSELEIHGIKPEEFDEDIQVWRSALKNYWSLLTPLIFSDHPKRPGDEDPVPPFYMIRNAMDMNARYGNLNQALLNQGKSVWVMNVVPVKARNTLPIILDRGFTGALHDWCEPFPTYPRTYDMLHANELLTHLSSERCSLMDLFLEMDRILRPEGWVVLSDKLGVIEMARTLAARVRWEARVIDIQDGSDQRLLVCQKPLLKK

SEQ ID NO: 4070 - protein, 330 aa, Arabidopsis thaliana
MANLSLSLYLILRIYALLLLFNVSFAKTLKRDMKALNEIKKLVGWRLVYSWVGDDPCGDGVLPPWSGVTCSKVGDYRVVVKLEVYSMSIVGNFPKAITKLLDLTVLDMHNNKLTGPIPPEIGRLKRLITLNLRWNKLQQALPPEIGGLKSLTYLYLSFNNFKGEIPKELANLHELQYLHIQENHFTGRIPAELGTLQKLRHLDAGNNNLVGSISDLFRIEGCFPALRNLFLNNNYLTGGLPNKLANLTNLEILYLSFNKMTGAIPAALASIPRLTNLHLDHNLFNGSIPEAFYKHPNLKDMYIEGNAFKSDVKAIGAHKVLELSDTDFLV

SEQ ID NO: 4071 - protein, 504 aa, Arabidopsis thaliana
MGGCVSSQRKLSNKLQQKKQKRGRSGKCRSKISASMPDVPMKRMSNASVRDFAVSEYVHLDFDNCAAKMMCKRAEMSNANFHLTQLQWNCSQIDGNRISHEEAWYDSFSYIDSDSDDGSNSSVFEDANASAMGQVIQYEEFYESYLKIDGNKGETYSSKNEVSIKRNQVADESHHETFKTTTCEDHQDHRKKSSKVVMVSVRRTSIDSKSTPSEFSSAEKLLYRPKAGSMIQRSLGEKMTSQGSWSEVSPSSFKLRGLNFFRDKQKCPAPNCSPYIPIGVDLFACPKKINHIAQHIELPNLKPASSQVCDIPNLLIVNIQLPMYPTSMFGDYDGEGLSLVLYFKRNENYHKEISSHFKETIKRFMEDEMEKVKGFTRESTVPFRERLKIMAGLVNPEDFQLSSTERKLITAYNDRPVLSRPQHDFFQGPNYFEIDLDIHRFSYISRKGLESFRDRIKNGILDLGLTIQAQSPEELPEQVLCCVRLNKIDFVNHGQIPTLLTNKQ

SEQ ID NO: 4072 - protein, 499 aa, Arabidopsis thaliana
MEVRSESNITQARSDKLPLPPAVPKPRVQVWFVRVCSSILVWTCLVQLFAAGELWHSRIFTGLTNQISRFSAPVEPVPLPPPLPPPRNYTSNGILLVSCNGGLNQMRSAICDMVTVARLLNLTLVVPELDKTSFWADPSGFEDIFDVRHFIDSLRDEVRILRRLPKRFSRKYGYQMFEMPPVSWSDEKYYLKQVLPLFSKHKVVHFNRTDTRLANNGLPLSLQWLRCRVNFQGLKFTPQLEALGSKLVRILQQRGPFVALHLRYEMDMLAFSGCTHGCTEEEAEELKKMRYTYPWWREKEIVSEERRAQGLCPLTPEEVALVLKALGFEKNTQIYIAAGEIYGSEHRLSVLREAFPRIVKKEMLLESAELQQFQNHSSQMAALDFMVSVASNTFIPTYDGNMAKVVEGHRRYLGYKKTILLDRKRLVELLDLHHNKTLTWDQFAVAVKEAHERRAGAPTHRRVISDKPKEEDYFYANPQECLCEGTNCHDLFGHRNLTH

SEQ ID NO: 4073 - protein, 348 aa, Arabidopsis thaliana
MGSLCCVAAKSDRSNSTSGDFSFGLHEPYWRTNTSFSPPSSRWDVHGLMDGISCYGSSTSSNANVLRSPDLSQALHWTPNDFESATRRDQIVKQLPGTSRNVGIGDSEPGRNSSSRRFFLSKPVHPILHPSDNVRDTASDSADACSWSSGTPSSIDSVDVPEPVLDWNNNSTKAQQVAASSTFKCGLCNRYLSQKSPWGSRSIVRNRDMPVTGVLSCQHVFHVECLDQSTPKIQRNDPLCPICTKQEGEHFKSNNIVPRLKPLYEDGPSSRPWGCAQAGDCVESAVNVPPKNTMMMINRNRIRKSLSLRGNSSKDFSRKMKRSNSVAMENLANQVSLVHSRGKEKVSW

SEQ ID NO: 4074 - protein, 353 aa, Arabidopsis thaliana
MCGSSLRTTENFKMVSQIISCLSQSSSLLCLSDSRRLILPKTCTYGGLSRFSPGFASRRLFTVNRKKWRSACIFNSGKEPGGEGKLQGGSSEWPILQRWEVPWGWQTVSLTSFACALSFVLTGLTEMAVIPFLGIDVEKLTLDDKAEILFLDQGLTTAVVLAVIFTVAKTFDPLPEDILRYDLRQPVNLQKGWLVWGGIGLVGAVGAIALTGVVLSVFRTEAPEREVDSLMKLLPLIGSSNISTLSLVGITGILAPLLEETVFRGFFMVSLTKWVPTPIAIIISSAAFALAHFTPGEFPQLFILGSVLGLSYAQTRNLITPMVIHGFWNSGVILLLTFLQIQGYDIKELLQAN

SEQ ID NO: 4075 - protein, 331 aa, Arabidopsis thaliana
MGSSQGSTLSADVMSLVDTLPVLAKTLIAGGAAGAIAKTAVAPLERIKILLQTRTNDFKTLGVSQSLKKVLQFDGPLGFYKGNGASVIRIIPYAALHYMTYEVYRDWILEKNLPLGSGPIVDLVAGSAAGGTAVLCTYPLDLARTKLAYQVSDTRQSLRGGANGFYRQPTYSGIKEVLAMAYKEGGPRGLYRGIGPTLIGILPYAGLKFYIYEELKRHVPEEHQNSVRMHLPCGALAGLFGQTITYPLDVVRRQMQVENLQPMTSEGNNKRYKNTFDGLNTIVRTQGWKQLFAGLSINYIKIVPSVAIGFTVYESMKSWMRIPPRERSKPA

SEQ ID NO: 4076 - protein, 386 aa, Arabidopsis thaliana
MNLSHRVGSRFHTASLEASSSANNPFAEGSGEMSPGPSIPLRRAALFLAAISISCFVLYRAADSLSFSPPIFDLSSYLDNEEPKLEDVLSKAATRDRTVVLTTLNAAWAAPGSVIDLFFESFRIGEETSQILDHLVIVALDAKAYSRCLELHKHCFSLVTEGVDFSREAYFMTRSYLKMMWRRIDLLRSVLEMGYNFVFTDADVMWFRNPFPRFYMYADFQIACDHYLGRSNDLHNRPNGGFNFVRSNNRTILFYKYWYASRLRFPGYHDQDVLNFLKAEPFVFRIGLKMRFLNTAYFGGLCEPSRDLNLVRTMHANCCYGMESKLHDLRIMLQDWKDFMSLPLHLKQSSGFSWKVPQNCSLDSLRRYDESVEDDEESDPPGESQD

SEQ ID NO: 4077 - protein, 279 aa, Arabidopsis thaliana
MDDDGFRNWGYYEPAAATFKGNLGLQLMSTIDRNTKPFLPGRDPNLMMGPNGSYHHQEPPIHMSYNWINQQKDKFFNMLPVTTATPNYGNVLPETSSAPSMQMNLHHHLQTEENPVKLEEEIVVQTKKRKTNAKAGSTPKAKKPRKPKDENSNNNNNNNTNVTRVKPAKKSVDLVINGVSMDISGLPVPICTCTGAPQQCYRWGCGGWQSACCTTNISMHPLPMSTKRRGARISGRKMSQGAFKKVLEKLASDGFNFGNPIDLKSHWARHGTNKFVTIR

SEQ ID NO: 4078 - protein, 252 aa, Arabidopsis thaliana
MEESQELALTQLRKSVEKLSSSTEGYDKPTLMRFLVARSMDPVKAAKMFVDWQKWRASMVPPTGFIPESEVQDELEFRKVCLQGPTKSGHPLVLVITSKHFASKDPANFKKFVVYALDKTIASGNNGKEVGGEKLVAVIDLANITYKNLDARGLITGFQFLQSYYPERLAKCYILHMPGFFVTVWKFVCRFLEKATQEKIVIVTDGEEQRKFEEEIGADALPEEYGGRAKLTAIQDVLLPQAAPVTLTNNNV

SEQ ID NO: 4079 - protein, 648 aa, Arabidopsis thaliana
MAKSWFLVEKARRCLRTVFFMVAMLASLLVSSLPLLVAIGDVLVPSFLLSSFTCVTCYGAKEHLRRYGFKRSLTDIPIVSVVRSFLVICIYLLSDVPALSHGPYLGTVSLCSVVSVLLLSVKACLFTVNSQLNNEASFSPSRKRLHLKKSWGMPVLFLSSVVFALGHTVVAYRTSCRARRKILYHRVDPEAVLSCKSIFSGHQKVPRSPTPVVGKASKFDGEARRKPLSHDEGELPVRLLADVDSLFVTIRGLTVHYKLCSPGSPRQSISSNVLEANSSYNTPEIMAGRSKFDRKVLSMVTKSQHHHHHRSYNSLFNNSSLHDPLLDGSPTSPLLFKEIKEGTGLVDDMNVFNFGAEEQDLGESGQFGVVLVHGFGGGVFSWRHVMGSLAQQLGCVVTAFDRPGWGLTARPHKNDLEERQLLNPYSLENQVEMLIAFCYEMGFSSVVFVGHDDGGLLALKAAQRLMATNDPIKVVVKGVVLLNTSLSREVVPAFARILLHTSLGKKHLVRPLLRTEIAQVVNRRAWYDPAKMTTDVLRLYKAPLHVEGWDEALHEIGRLSSEMVLAPQNAASLLKAVENLPVLVIAGAEDALVPLKSSQGMASKLLNSRLVAISGCGHLPHEECPKALLAAMSPFITRLVIRPDLQSQ

SEQ ID NO: 4080 - protein, 1131 aa, Arabidopsis thaliana
MSSLSRELVFLILQFLDEEKFKETVHKLEQESGFFFNMKYFEDEVHNGNWDEVEKYLSGFTKVDDNRYSMKIFFEIRKQKYLEALDKHDRPKAVDILVKDLKVFSTFNEELFKEITQLLTLENFRENEQLSKYGDTKSARAIMLVELKKLIEANPLFRDKLQFPTLRNSRLRTLINQSLNWQHQLCKNPRPNPDIKTLFVDHSCGPPNGARAPSPVNNPLLGGIPKAGGFPPLGAHGPFQPTASPVPTPLAGWMSSPSSVPHPAVSAGAIALGGPSIPAALKHPRTPPTNASLDYPSADSEHVSKRTRPMGISDEVNLGVNMLPMSFSGQAHGHSPAFKAPDDLPKTVARTLSQGSSPMSMDFHPIKQTLLLVGTNVGDIGLWEVGSRERLVQKTFKVWDLSKCSMPLQAALVKEPVVSVNRVIWSPDGSLFGVAYSRHIVQLYSYHGGEDMRQHLEIDAHVGGVNDISFSTPNKQLCVITCGDDKTIKVWDAATGVKRHTFEGHEAPVYSVCPHYKENIQFIFSTALDGKIKAWLYDNMGSRVDYDAPGRWCTTMAYSADGTRLFSCGTSKDGESFIVEWNESEGAVKRTYQGFHKRSLGVVQFDTTKNRYLAAGDDFSIKFWDMDAVQLLTAIDGDGGLQASPRIRFNKEGSLLAVSGNENVIKIMANSDGLRLLHTFENISSESSKPAINSIAAAAAAAATSAGHADRSANVVSIQGMNGDSRNMVDVKPVITEESNDKSKIWKLTEVSEPSQCRSLRLPENLRVAKISRLIFTNSGNAILALASNAIHLLWKWQRNERNATGKATASLPPQQWQPASGILMTNDVAETNPEEAVPCFALSKNDSYVMSASGGKISLFNMMTFKTMATFMPPPPAATFLAFHPQDNNIIAIGMDDSTIQIYNVRVDEVKSKLKGHSKRITGLAFSNVLNVLVSSGADAQLCVWNTDGWEKQRSKVLPLPQGRPNSAPSDTRVQFHQDQAHFLVVHETQLAIYETTKLECMKQWAVRESLAPITHATFSCDSQLVYASFMDATVCVFSSANLRLRCRVNPSAYLPASLSNSNVHPLVIAAHPQEPNMFAVGLSDGGVHIFEPLESEGKWGVAPPAENGSASGAPTAPSVGASASDQPQR

SEQ ID NO: 4081 - protein, 286 aa, Arabidopsis thaliana
MSQAPNPEEEDDTIEIREVWNHNLEQEMALIEQSIDDFPYVAMDTEFPGIVCKTVTANPNPNPYSIHYEYNYDTLKANVNMLKLIQLGLTLSDEKGNLPTCGTNKQCIWQFNFREFNVISDMFALDSIELLRKSAIDLEKNNECGVDAKRFAELLMGSGVVLNDKIHWVTFHCGYDFGYLLKLLSGKELPEEISDFFDQMEKFFPVVYDIKYLMGFCTNLYGGLEKIAELLGVKRVGISHQAGSDSLLTLRTFIKMKEFFFTGSLLKYSGFLFGLDNPRLLTGSKN

SEQ ID NO: 4082 - protein, 352 aa, Arabidopsis thaliana
MSVPPRFRSVNSDEREFRSVLGPTGNKLQRKPPGMKLEKPMMEKTIIDSKDEKAKKPTTPASPRTTLKQCSSLCSSILRKNSASMTASYSSDASSSCESSPLSVASSSSCKKVVRRSGSVSSTRKLSVGKEEEKVSGDCFADGRKRCAWITPKADPCYVAFHDEEWGVPVHDDKKLFELLCLSGALAELSWTDILSRRHILREVFMDFDPVAVAELNDKKLTAPGTAAISLLSEVKIRSILDNSRHVRKIIAECGSLKKYMWNFVNNKPTQSQFRYQRQVPVKTSKAEFISKDLVRRGFRSVSPTVIYSFMQAAGLTNDHLIGCFRYQDCCVDAETTTTTKAKKKNERESDK

SEQ ID NO: 4083 - protein, 345 aa, Arabidopsis thaliana
MFIAVEVSPVMEDITRQSKKTSVENETGDDQSATSVVLKAKRKRRSQPRDAPPQRSSVHRGVTRHRWTGRYEAHLWDKNSWNETQTKKGRQVYLGAYDEEDAAARAYDLAALKYWGRDTILNFPLCNYEEDIKEMESQSKEEYIGSLRRKSSGFSRGVSKYRGVAKHHHNGRWEARIGRVFGNKYLYLGTYATQEEAAIAYDIAAIEYRGLNAVTNFDISRYLKLPVPENPIDTANNLLESPHSDLSPFIKPNHESDLSQSQSSSEDNDDRKTKLLKSSPLVAEEVIGPSTPPEIAPPRRSFPEDIQTYFGCQNSGKLTAEEDDVIFGDLDSFLTPDFYSELNDC

SEQ ID NO: 4084 - protein, 383 aa, Arabidopsis thaliana
MESIEQSIIPGLPDDLALRCIAKLSHGYHGVLECVSRGWRDLVRGADYSCYKARNGWSGSWLFVLTERSKNQWVAYDPEADRWHPLPRTRAVQDGWHHSGFACVCVSNCLLVIGGCYAPSVSSFPHQKPVVTKDVMRFDPFKKQWKMVASMRTPRTHFACTSVSGKVYVAGGRNLTHSRGIPSAEVYDPVADRWEELPAMPRPQMDCSGLSYRGCFHVLSDQVGFAEQNSSEVFNPRDMTWSTVEDVWPFSRAMQFAVQVMKNDRVYTIVDWGESLIKTRDTDEGEWYNVGSVPSVVLPNHPRELEAFGYGFAALRNELYVIGGKVLKWEESGAGRFDIVRLPVVRVCNPLDRPLNWRETKPMCIPAGGSIIGCVSLEESSPP

SEQ ID NO: 4085 - protein, 651 aa, Arabidopsis thaliana
MAGDCAIDTEKYSLLEDFNVDVEVENKAFETFSLCFWVYLLDSTTYPSAIIRQINLFCELGEKVHSDMSVSAPFLVLDENKKMMLLPLTLLHREAPDPVNTSSWTEVPNVSTTAKFPLQKWVHVGCEVSRNYMRLYICGELVGEQVLTSLMTNGTNSDCARKISLFSVGGDGYSVQGFIHSAEVLPSNLSASYHYTKDPPLWLSVDKPSTSGIELDEDGVWSVVSGTFCSLDVVLTNAIGQPVHKDVKVVASLLYADSGTHVEKRSDFEAFLLVSYEGIELSAEDKPCNLLNGCASFKFKLSQLSSKSDKRLFCIKFEIPEVKANYPFLETVTNQIRCISRNRDSVSSMKRIRLGEEKVSESKIVNGNGTSMEWRPQNHEEDNSSTDSENTEMRDSTAFRRYSIPDWIIFKYCLGNLTERALLLKEITNNSSDEEVSEFADQVSLYSGCSHHGYQIKMARKLIAEGTNAWNLISRNYRHVHWDNVVIEIEEHFMRIAKCSSRSLTHQDFDLLRRICGCYEYITQENFETMWCWLFPVASAVSRGLINGMWRSASPKWIEGFVTKEEAERSLQNQVPGTFILRFPTSRSWPHPDAGSVVVTYVGHDLVIHHRLLTINHICDSSERYTDAKQLQDMLLAEPELSRLGRIIRGI

SEQ ID NO: 4086 - protein, 896 aa, Arabidopsis thaliana
MEDKGKGVVEGDEGNLISELEEGPSNMECDKQVLGGDTNYDDKDLNSDEEGLVDDDDDDSDDDDEGDESEEEDDFEAGSVPNTFERPEYEALAERKRKALADSQRNPSNISNSTSGVEGFMEFMSSGRRRKSRKYKKKGRRPGSKKEVAPDILKRFREALFLHAHGRDIEALPILVEVIKQAPAFDIAYYYLSRVSEQLGKTESSSTEALKIAANIKGSKSPFWKLLYERFKEQENISVARSYASKAIQADPDDIPLKYEYADICLNTGKYREAAETFEQIFRRCPERIEALKWGVQYFLKSGEGERAASILEDHIKSHSSEVGHDVLDLLASVFMKINAHDRALKYIHDVRQIYNVGKELSSSLKIRQAICHVHLEEMEQAESVLSILPQEAVSEHPELITNLADELTNIGNFHSALKYYIEAISEPVNGNLFVKIARCYMSLEERKQAIVFYYKALNELSDTVDVRITLASLLLEDGKRDEAVLVLSPPENPDPDTAKLKAWWKNRKIRMNLCQIYHSEGMLEDFANTALQLVLKWVWRRTVKGKRKRLVLSEHQRNKKRRRPRDAQASQLRGGPKKWRKIRATLNETRRIRERAAIKAHNEDVCSESEEEVIKDEEYHRLFVDLCKALASLQRYWEALEIVNLARRLDAKMLPVETKKELQSLGAKISCDTMDPKQWFDCVRSVIQQHPYRLNAWNCYYSVISRLGKRASTEAKFMHHLRSKYRDCVPPILIAGHHFTVTSRHQDAAREYLEAYKLMPESPLINLCVGAALINLALGFRLKNRHECLAQGFAFLYNNLRICSNSQEALYNVARAYQHVGLVTLAASYYEKVLAIYEKDYTMPKLPNEDPIVAEERKPVNCDLRKEAAHNLHLIYKHSGAFDLARQVLKDHCTF

SEQ ID NO: 4087 - protein, 501 aa, Arabidopsis thaliana
MNGGDDAATSGPPPSLEWRFSQVFGERTAGEEVQEVDIISAIEFDKSGDHLATGDRGGRVVLFERTDTKDHGGSRKDLEQTDYPVRHPEFRYKTEFQSHEPEFDYLKSLEIEEKINKIRWCQPANGALFLLSTNDKTIKYWKVQEKKIKKISEMNIDPSESSNIPPQLVTNGLPADKGHDYLSKDFSFPPGGIPSLRLPVVVTSQETNLVARCRRVYAHAHDYHINSISNSSDGETFISADDLRVNLWNLEISNQSFNIVDVKPTNMEDLTEVITSAEFHPIHCNMLAYSSSKGSIRLIDMRQSALCDSHTKLFEEPEAPGSRSFFTEIIASISDIKFSKDGRYILSRDYMTLKLWDINMDSGPVASYQVHEHLRPRLCDLYENDSIFDKFECCLSGDGLRVATGSYSNLFRVFGASQGSTEAATLEASKNPMRRQIQTPARPSRSIGSMTRVVRRGSESPGTEANGNAYDFTTKLLHMAWHPTENSIACAAANSLYMYYA

SEQ ID NO: 4088 - protein, 263 aa, Arabidopsis thaliana
MNRNSKGRAWYDKIYRKLASQGNVSSGLDSVKDEPEKLREEQMEGDGFKEKLSDSVLIDEKLEEYSDCDRTATTSRSHTDPVSSQSTHQTPESFRTPITCDDDTFVSVSGISRDVSNLIPFATETPASPVQEKMANTRSFSNNSVKGNQDEFFIEDFDVGPMDTIDLYDMTFREDPSDFDDNLLYAMRDRTKQLRSFKRKIMDAIKSKRRREKEYEQLAIWFGDADMGCDLVNDKEQSTTSIDSKSSQTNVPVVSEDSEWEIL

SEQ ID NO: 4089 - protein, 328 aa, Arabidopsis thaliana
MADNTGSEMKSGSFMLEKSAKIFVAGHRGLVGSAIVRKLQDQGFTNLVLRTHSELDLTSQSDVESFFATEKPVYVILAAAKVGGIHANNTYPADFIGVNLQIQTNVIHSAYTHGVKKLLFLGSSCIYPKFAPQPIPESALLTGPLEPTNEWYAIAKIAGIKMCQAYRLQHQWDAISGMPTNLYGQNDNFHPENSHVLPALMRRFHEAKANNADEVVVWGSGSPLREFLHVDDLADACVFLMDQYSGFEHVNVGSGVEVTIKELAELVKEVVGFKGKLVWDTTKPDGTPRKLMDSSKLASLGWTPKISLKDGLSQTYEWYLENVVQKKQ

SEQ ID NO: 4090 - protein, 687 aa, Arabidopsis thaliana
MEFLGDSQNHDSSETEKKNKKKKRFHRHTPHQIQRLESTFNECQHPDEKQRNQLSRELGLAPRQIKFWFQNRRTQKKAQHERADNCALKEENDKIRCENIAIREAIKHAICPSCGDSPVNEDSYFDEQKLRIENAQLRDELERVSSIAAKFLGRPISHLPPLLNPMHVSPLELFHTGPSLDFDLLPGSCSSMSVPSLPSQPNLVLSEMDKSLMTNIAVTAMEELLRLLQTNEPLWIKTDGCRDVLNLENYENMFTRSSTSGGKKNNLGMEASRSSGVVFTNAITLVDMLMNSVKLTELFPSIVASSKTLAVISSGLRGNHGDALHLMIEELQVLSPLVTTREFCVLRYCQQIEHGTWAIVNVSYEFPQFISQSRSYRFPSGCLIQDMSNGYSKVTWVEHGEFEEQEPIHEMFKDIVHKGLAFGAERWIATLQRMCERFTNLLEPATSSLDLGGVIPSPEGKRSIMRLAHRMVSNFCLSVGTSNNTRSTVVSGLDEFGIRVTSHKSRHEPNGMVLCAATSFWLPISPQNVFNFLKDERTRPQWDVLSNGNSVQEVAHITNGSNPGNCISVLRGFNASSSQNNMLILQESCIDSSSAALVIYTPVDLPALNIAMSGQDTSYIPILPSGFAISPDGSSKGGGSLITVGFQIMVSGLQPAKLNMESMETVNNLINTTVHQIKTTLNCPSTA

SEQ ID NO: 4091 - protein, 713 aa, Arabidopsis thaliana
MASVQQNGQRFGVSEPISMGGPTEFDVIKTRELEKHLQDVGLYESKEEAVRREEVLGILDQIVKTWIKTISRAKGLNDQLLHEANAKIFTFGSYRLGVHGPGADIDTLCVGPRHATREGDFFGELQRMLSEMPEVTELHPVPDAHVPLMGFKLNGVSIDLLYAQLPLWVIPEDLDLSQDSILQNADEQTVRSLNGCRVTDQILRLVPNIQNFRTTLRCMRFWAKRRGVYSNVSGFLGGINWALLVARICQLYPNALPNILVSRFFRVFYQWNWPNAIFLCSPDEGSLGLQVWDPRINPKDRLHIMPIITPAYPCMNSSYNVSESTLRIMKGEFQRGNEICEAMESNKADWDTLFEPFAFFEAYKNYLQIDISAANVDDLRKWKGWVESRLRQLTLKIERHFKMLHCHPHPHDFQDTSRPLHCSYFMGLQRKQGVPAAEGEQFDIRRTVEEFKHTVNAYTLWIPGMEISVGHIKRRSLPNFVFPGGVRPSHTSKGTWDSNRRSEHRNSSTSSAPAATTTTTEMSSESKAGSNSPVDGKKRKWGDSETLTDQPRNSKHIAVSVPVENCEGGSPNPSVGSICSSPMKDYCTNGKSEPISKDPPENVVAFSKDPPESLPIEKIATPQAHETEELEESFDFGNQVIEQISHKVAVLSATATIPPFEATSNGSPFPYEAVEELEVLPTRQPDAAHRPSVQQRKPIIKLSFTSLGKTNGK

SEQ ID NO: 4092 - protein, 269 aa, Arabidopsis thaliana
METKQSIPLLMPYKMGPFNLSHRVVLAPLTRSRSYGNIPQPNAKLYYTQRTTPGGLLISESCVVSETSLGYPDLPGLWNRDQVEAWKPIVDAVHSKGGIFFCQIWHGGRVFHQDQPNGEAPVSSTDKPLMCKNMYGGQFKPPRRLRSDELPAIVNDFRIAARNAIEAGFDGVEVHGAHGYLIDQFLKDKVNDRSDQYGGSLENRCRFALEVIEAVVNEIGSDRVGIRLSPFADYMESGDSNPEALGLYLVQAMNKHGMESSTVTWLNLE

SEQ ID NO: 4093 - protein, 992 aa, Arabidopsis thaliana
MKMNMKKFLKKLRITPNQRDDGEGSVSNRSNKSSDAEPSPSDSLRSQDNSEFKPFLGLSNWLSSVTHRKSPSSSNATNSKEDDTTMEHGGPVGSESGMQGLGSSSNSKDPEVEEEYQIQLALELSAREDPEAAQIEAMKQFSLGSRPSAPENTPAELMAYRYWNYNCLGYDDKIVDGFYDLCGVMNESSLKRIPPLVDLQGTLVSDGVTWDAVLVNSSKDSNLLRLEQMALDIAAKSKSASSSGFVNSELVRQLAVLVADYMGGPVLDPDSTLRAWWSLSYSLKATLRSMVLPLGSLTIGLARHRALLFKVLCDSVGVPCRIVKGQQYTGSDDVAMNSIKTDDGREYIVDLMGDPGTLIPADAAGLQMDFDDSVYSASPRDVDSSHVASSSSGVESSIEEHTESWSAEHRSRTKGSREENQSAGGGDLMIPNIREAVGSQKAPVQHLSSKPTHSFTHARSPSWTEGVSSPAGRRMKVKDVSQYMIDAAKENPQLAQKLHDVLLESGVVAPRNLFSEVYSESMEATGEIKSVAESNDEKGKDFGTIQQGRNQSNLGPVRFLPPLPRPQSKAITHDLREHSGSGLGHLSEHCNIDGHSDSSHSETSTDYPRNVPVAVAAAAVVASSMVVAAAKSANSDSSTLELSAAAAAAVMATAAAVSRQFELDSLSNGDAGSGGLHGVDSGGERISDRSIGNESSKSDAAIDDVAECEILWEEITVAERIGLGSYGEVYRGDWHGTAVAVKKFIDQDITGEALEEFRSEVRMMRRLRHPNIVLFMGAVTRPPNLSIVTEFLPRGSLYRLIHRPNNQLDERKRLRMALDAARGMNYLHSCNPVIVHRDLKSPNLLVDKNWVVKVCDFGLSRMKVSTYLSSKSTAGTAEWMAPEVLRNEPADEKCDVYSYGVILWELFTLQQPWGKMNPMQVVGAVGFQHRRLDIPEFVDPGIADIIRKCWQTDPRLRPSFGEIMDSLKQLQKPIQRAAVPSSSALTTDEQEQ

SEQ ID NO: 4094 - protein, 372 aa, Arabidopsis thaliana
MLCFVRFQAGFVRIIVAARKRFRYFLMAAEDRSEELSSNVENGSCNSNEGINPETSSHWIENVVKVRKPYTVTKQREKWSEEEHDRFLEAIKLYGRGWRQIQEHIGTKTAVQIRSHAQKFFSKMAQEADSRSEGSVKAIVIPPPRPKRKPAHPYPRKSPVPYTQSPPPNLSAMEKGTKSPTSVLSSFGSEDQVNRCSSPNSCTSDIQSIGATSIDKKNNYTTSKQPFKDDSDIGSTPISSITLFGKIVLVAEESHKPSSYNDDDLKQMTCQENHYSGMLVDTNLSLGVWETFCTGSNAFGSVTEASENLEKSAEPISSSWKRLSSLEKQGSCNPVNASGFRPYKRCLSEREVTSSLTLVASDEKKSQRARIC

SEQ ID NO: 4095 - protein, 352 aa, Arabidopsis thaliana
MVRTPCCKAELGLKKGAWTPEEDQKLLSYLNRHGEGGWRTLPEKAGLKRCGKSCRLRWANYLRPDIKRGEFTEDEERSIISLHALHGNKWSAIARGLPGRTDNEIKNYWNTHIKKRLIKKGIDPVTHKGITSGTDKSENLPEKQNVNLTTSDHDLDNDKAKKNNKNFGLSSASFLNKVANRFGKRINQSVLSEIIGSGGPLASTSHTTNTTTTSVSVDSESVKSTSSSFAPTSNLLCHGTVATTPVSSNFDVDGNVNLTCSSSTFSDSSVNNPLMYCDNFVGNNNVDDEDTIGFSTFLNDEDFMMLEESCVENTAFMKELTRFLHEDENDVVDVTPVYERQDLFDEIDNYFG

SEQ ID NO: 4096 - protein, 513 aa, Arabidopsis thaliana
MFQDGSRSSGSGRGLSTTAVSNGGWRTRGFLRGWQIQNTLFNNIKFMILCCFVTILILLGTIRVGNLGSSNADSVNQSFIKETIPILAEIPSDSHSTDLAEPPKADVSPNATYTLEPRIAEIPSDVHSTDLVELPKADISPNATYTLGPRIAEIPSDSHLTDLLEPPKADISPNATYTLGPKITNWDSQRKVWLNQNPEFPNIVNGKARILLLTGSSPGPCDKPIGNYYLLKAVKNKIDYCRLHGIEIVYNMANLDEELSGYWTKLPMIRTLMLSHPEVEWIWWMDSDALFTDILFEIPLPRYENHNLVIHGYPDLLFNQKSWVALNTGIFLLRNCQWSLDLLDAWAPMGPKGKIRDETGKILTAYLKGRPAFEADDQSALIYLLLSQKEKWIEKVYVENQYYLHGFWEGLVDRYEEMIEKYHPGLGDERWPFVTHFVGCKPCGSYADYAVDRCFKSMERAFNFADNQVLKLYGFSHRGLLSPKIKRIRNETVSPLESVDKFDIRRMHMETKP

SEQ ID NO: 4097 - protein, 389 aa, Arabidopsis thaliana
MGRVKLKIKRLESTSNRQVTYTKRKNGILKKAKELSILCDIDIVLLMFSPTGRATAFHGEHSCIEEVISKFAQLTPQERTKRKLESLEALKKTFKKLDHDVNIHDFLGARNQTIEGLSNQVAIYQAQLMECHRRLSCWTNIDRIENTEHLDLLEESLRKSIERIQIHKEHYRKNQLLPIECATTQFHSGIQLPMAMGGNSSMQEAHSMSWLPDNDHQQTILPGDSSFLPHREMDGSIPVYSSCFFESTKPEDQICSNPGQQFEQLEQQGNGCLGLQQLGEEYSYPTPFGTTLGMEEDQEKKIKSEMELNNLQQQQQQQQQQQQQDPSMYDPMANNNGGCFQIPHDQSMFVNDHHHHHHHHHQNWVPDSMFGQTSYNQVCVFTPPLELSR

SEQ ID NO: 4098 - protein, 572 aa, Arabidopsis thaliana
MGKPARWLKSVLLGKKPSKSSGSKDKERIVNGKEVVVISKIEESDVVSDLSSIGNAAVYTSGIVETQNLKHEDVSDDEIQVSEVQPTDSQDVASVPDDSLSESEKIQQEIAAVTVQAAYRGYLARRAFKILKGIIRLQALIRGHMVRRQAVSTLCCVMGIVRLQALARGREIRHSDIGVEVQRKCHLHHQPLENKANSVVDTHSYLGINKLTGNAFAQKLLASSPNVLPLSLDNDSSNSIWLENWSASCFWKPVPQPKKASLRKSQKKFASNPQIVEAEFARPKKSVRKVPSSNLDNSSVAQTSSELEKPKRSFRKVSTSQSVEPLPSMDNPQVDLEKVKRGLRKVHNPVVENSIQPQLVPQIAVEKPNGSLEESVNAFDEEKEDEVAETVVQQPEELIQTHTPLGTNESLDSTLVNQIEESEENVMAEEKEDVKEERTPKQNHKENSAGKENQKSGKKASSVTATQTAEFQESGNGNQTSSPGIPSYMQATKSAKAKLRLQGSSSPRQLGTTEKASRRYSLPSSGNSAKITSHSPKTRVSNSSGKSGNKTEKTLLSSREGNGKATPVEWKR

SEQ ID NO: 4099 - protein, 1086 aa, Arabidopsis thaliana
MKAPSNGFLPSSNEGEKKPINSQLWHACAGPLVSLPPVGSLVVYFPQGHSEQVAASMQKQTDFIPNYPNLPSKLICLLHSVTLHADTETDEVYAQMTLQPVNKYDREALLASDMGLKLNRQPTEFFCKTLTASDTSTHGGFSVPRRAAEKIFPPLDFSMQPPAQEIVAKDLHDTTWTFRHIYRGQPKRHLLTTGWSVFVSTKRLFAGDSVLFVRDEKSQLMLGIRRANRQTPTLSSSVISSDSMHIGILAAAAHANANSSPFTIFFNPRASPSEFVVPLAKYNKALYAQVSLGMRFRMMFETEDCGVRRYMGTVTGISDLDPVRWKGSQWRNLQVGWDESTAGDRPSRVSIWEIEPVITPFYICPPPFFRPKYPRQPGMPDDELDMENAFKRAMPWMGEDFGMKDAQSSMFPGLSLVQWMSMQQNNPLSGSATPQLPSALSSFNLPNNFASNDPSKLLNFQSPNLSSANSQFNKPNTVNHISQQMQAQPAMVKSQQQQQQQQQQHQHQQQQLQQQQQLQMSQQQVQQQGIYNNGTIAVANQVSCQSPNQPTGFSQSQLQQQSMLPTGAKMTHQNINSMGNKGLSQMTSFAQEMQFQQQLEMHNSSQLLRNQQEQSSLHSLQQNLSQNPQQLQMQQQSSKPSPSQQLQLQLLQKLQQQQQQQSIPPVSSSLQPQLSALQQTQSHQLQQLLSSQNQQPLAHGNNSFPASTFMQPPQIQVSPQQQGQMSNKNLVAAGRSHSGHTDGEAPSCSTSPSANNTGHDNVSPTNFLSRNQQQGQAASVSASDSVFERASNPVQELYTKTESRISQGMMNMKSAGEHFRFKSAVTDQIDVSTAGTTYCPDVVGPVQQQQTFPLPSFGFDGDCQSHHPRNNLAFPGNLEAVTSDPLYSQKDFQNLVPNYGNTPRDIETELSSAAISSQSFGIPSIPFKPGCSNEVGGINDSGIMNGGGLWPNQTQRMRTYTKVQKRGSVGRSIDVTRYSGYDELRHDLARMFGIEGQLEDPLTSDWKLVYTDHENDILLVGDDPWEEFVNCVQNIKILSSVEVQQMSLDGDLAAIPTTNQACSETDSGNAWKVHYEDTSAAASFNR

SEQ ID NO: 4100 - protein, 248 aa, Arabidopsis thaliana
MLEAVDSSGVVNGGFPQIQSFYGDCSSEEELSVLPRHTKVVVTGNNRTKSVLVGLQGVVKKAVGLGGWHWLVLTNGIEVKLQRNALSVLEPPTGNEEDDDLDFENTQRNGSDMIVSFPASEDTLKPHKSKLRGQRSSRSSHKTMSRSLSSDSQSKSSGFTPPENMQKVDLSKLEMPALLNYWRHFNLVDAIPNPSKEQLIDIVQRHFMSQQMDELQVIVGFVQAAKRMKKACKFQSKESRNTDLNCIS

SEQ ID NO: 4101 - protein, 605 aa, Arabidopsis thaliana
MADPLNGKSFFICFSLLFSFTLLFISPLYATESPVIEDVSTDVAVSVSETNREAVLLHNLEELVKNLTELVANLDAKLSATPLKEKNEISVDDDIGEEKERGRAKAFSVTKYSPFWSERFQFTSAVKLNSDATCINVLPFRDFEGSSKYFAIGDSKGRVYVFLRNGDVLIEFFTTVDSPVTAMVSYSSVFKNSSFVVTGHQNGAVLLHRIHEGSNGEDWNSNSVSMEHVGKFDVDDSADPVTLLEVHHVGRVRYILATDLSGKLTVLTENRTVYGSVIPSSRPLVFLKQRLLFLTESGAGSLDLRSMKIRETECEGLNHSLARTYVFDAAERSKAYGFTSEGEIIHVLLHGDIMNFKCRVRSKKKFQMEEPVALQSIKGYLLVINEEKVFAFNVSTQHYVRTAGPRLLFSAGLEEIRSAFLSHRESSSRTTTVVKTRPLIASDRENLLVIGLENGYFAVYKSKLPTLKGDFNTMLWSSPVFFFILFLFGAWHFFAKKKESLTAWGPDDPFTPTGAQNSSAKEPTFTEPSRRNDDLMDLRRRYAGGSYRSVGANDPSSRAPVDGNYRTTAQDHNNYRGGGSGLDSNGFGNRRDHLFGNNKVLDNES

SEQ ID NO: 4102 - protein, 64 aa, Arabidopsis thaliana
MIIFLGFCSISRIRVGNHHLIDYRGWTWRDLYGQNNISLILTNQHLVDLYLINSSLISILSTPR

SEQ ID NO: 4103 - protein, 303 aa, Arabidopsis thaliana
MEEPCETLDSGEAYQISRYHNYNQHSSRSSSPWLDLRVFYVRISNFVVEDSTPEVLTINHIPLDPDTLLEINGVRMGMYSEGGSSQLRRDRVDKKSEEATYVSTDNIRLTGSVKFEVYDKNELVLSGTLEMSGSNGFTGESKNRWKMNCEAEVTAGSGFLKEKSINGQELSSPLPTIEVYVTGCFSGTPIILTKTLQLGLKKKQSRRMALDAIPEYETAEPQKDTSYALDLQATTEYGNYKEEYEGDMYWRSECIDGEMSWFNAGVRVGVGIGLGVCVGLGIGVGLLVRTYQSTTRTFRRRLL

SEQ ID NO: 4104 - protein, 488 aa, Arabidopsis thaliana
MSFRDDNTEEGRNDLRRPFLHTGSWYRMGSRQSSMLESSQVIRDSSISVLACVLIVALGPIQFGFTCGYSSPTQAAITKDLGLTVSEYSVFGSLSNVGAMVGAIASGQIAEYVGRKGSLMIAAIPNIIGWLSISFAKDTSFLYMGRLLEGFGVGIISYTVPVYIAEIAPQTMRGALGSVNQLSVTIGIMLAYLLGLFVPWRILAVLGVLPCTLLIPGLFFIPESPRWLAKMGLTDDFETSLQVLRGFETDITVEVNEIKRSVASSSKRSAVRFVDLKRRRYYFPLMVGIGLLALQQLGGINGVLFYSSTIFESAGVTSSNVATFGVGVVQVVATGIATWLVDKAGRRLLLMISSIGMTISLVIVAVAFYLKEFVSPDSNMYNILSMVSVVGVVAMVISCSLGMGPIPWLIMSEILPVNIKGLAGSIATLLNWFVSWLVTMTANMLLAWSSGGTFTLYALVCGFTVVFVSLWVPETKGKTLEEIQALFR

SEQ ID NO: 4105 - protein, 538 aa, Arabidopsis thaliana
MAVYYTSNVGCYQQEPIFLNHQQQNQQASSSSAAASFTVTGGDTVRNEMVFIPPTTTGDVVTGNGTVSSSDLSFHDGQGLSLSLGTQISVAPFHFHQYQLGFTSQNPSISVKETSPFHVDEMSVKSKEMILLGQSDPSSGYAGNGGNGFYNNYRYNETSGGFMSSVLRSRYLKPAQNLLDEVVSVKKELNQMGKKKMKVNDFNSGSKEIEGGGGELSSDSNGKSIELSTIEREELQNKKNKLLTMVDEVDKRYNQYYHQMEALASSFEIVAGLGSAKPYTSVALNRISRHFRALRDAIKEQIQIVREKLGEKGGESLDEQQGERIPRLRYLDQRLRQQRALHQQLGMVRPAWRPQRGLPENSVSVLRAWLFEHFLHPYPKESEKIMLAKQTGLSKNQVANWFINARVRLWKPMIEEMYKEEFGDESELLISKSSQEPNSTNQEDSSSQQQQQQENNNNSNLAYSSADTTNIVFSSETKPDRVLGNDNDPQQQQINRSSDYDTLMNYHGFGVDDYRYISGSNQQESRFSNSHHLHDFVV

SEQ ID NO: 4106 - protein, 350 aa, Arabidopsis thaliana
MMQTCCIHQSFCFPHRVFPRFDASIGIKPPKLCQVGFIGKTQSYGISSPIRQRRLYVNLNANDGHPSMSMLEEETSTENNAPSQEAELPFSKWSPSKYIWRGLSVPIIAGQVVLRILKGKIHWRNTLQQLERTGPKSLGVCLLTSTFVGMAFTIQFVREFTRLGLNRSIGGVLALAFSRELSPVITSIVVAGRMGSAFAAELGTMQVSEQTDTLRVLGADPIDYLITPRVIASCLALPFLTLMCFTVGMASSALLSDAVYGISINIIMDSAHRALRPWDIVSAMIKSQVFGAIISVISCSWGVTTTGGAKGVGESTTSAVVMSLVGIFIADFVLSSFFFQGAGDSLKNCV

SEQ ID NO: 4107 - protein, 564 aa, Arabidopsis thaliana
MAFQRRRNNYYNRLRRLLPFICAVSGALLILFALLSILSPPPDDSDRRISKHINYGANDEKKNTPVVFTVPRGGGRSDRDIWRSWNAEFFYGCCNASSKFPNAKAITRNDRYLAIATSGGLNQQRTGIVDAVVAARILNATLVIPKLDQKSYWKDASDFSNIFDVDWFMSFLSKDVKIIEKLPQKGGQTWSPRRMRVPRKCNEKCYINRVLPVLQKRHAVQLNKFDYRLSNKLRDDLQKLRCRVNYHALKFTDPILEMGNELVRRMRKRSKHFIALHLRFEPDMLAFSGCYYGGGEKEKKELGTIRRRWKTLHVNNPEKQRRQGRCPLTPEEVGLMLRALGYGSDVHIYVASGEVYGGEKSLAPLKALFPHFYSKDTIATKMELKPFSSYSSRMAALDFLVCDESDVFVTNNNGNMARILAGRRRYFGHKPTIRPNAKKLYKLFMSKENTTWEEFASRVRTFQKGFMGEPKEVRAGKGEFHENPAACICEDTDAKVKAGKMDSRKFGKKEQKEDEDAELSSSETDYEEDQTDLQDRGLYNGTRLDYDDALSVSEEPELEEMLSD

SEQ ID NO: 4108 - protein, 381 aa, Arabidopsis thaliana
MTCCFSCLNPRTKDIRVDIDNARCNSRYQTDSSVHGSDTTGTESISGILVNGKVNSPIPGGGARSFTFKELAAATRNFREVNLLGEGGFGRVYKGRLDSGQVVAIKQLNPDGLQGNREFIVEVLMLSLLHHPNLVTLIGYCTSGDQRLLVYEYMPMGSLEDHLFDLESNQEPLSWNTRMKIAVGAARGIEYLHCTANPPVIYRDLKSANILLDKEFSPKLSDFGLAKLGPVGDRTHVSTRVMGTYGYCAPEYAMSGKLTVKSDIYCFGVVLLELITGRKAIDLGQKQGEQNLVTWSRPYLKDQKKFGHLVDPSLRGKYPRRCLNYAIAIIAMCLNEEAHYRPFIGDIVVALEYLAAQSRSHEARNVSSPSPEISRTPRRDL

SEQ ID NO: 4109 - protein, 274 aa, Arabidopsis thaliana
MAYHSIPSSGFHYLNSPFGDTTFTKVFVGGLAWETQSETLRRHFDQYGDILEAVVITDKNTGRSKGYGFVTFRDPEAARRACVDPTPIIDGRRANCNLASLGRSRPPMQYAVIPHAPGRVRPPSPYVGSVQSPRGLHFGSHPYHQPPTYNYQQGVVYPYGVTPYGPDYMYSQSQGFYGPYMGQQYLQVYGVPGAVNSPGYQYGQLSHTIPGAHGYTAGQGYSHPGSHVLQLGATSPMSAIQSPYPSPSAPTHQRVIVQTPPQYIQSSGSDQTTG

SEQ ID NO: 4110 - protein, 1092 aa, Arabidopsis thaliana
MDPRNSSAWGGGDGLPLISSMGGVESKNRCCVTDDDGSIGTKLCEKPKAEEIDFSARKKKLKSKKGGSVSFALLDVEDDKEEAEDGDDKNPSIRSDEVVGETSMSKKKKKDKSGKHGVCEEDDDADKILAQHGITTTVSTGPEAEIALAQPEQVASADGAVDKDGEEKTVESATAKKKKKKKDKDKKASASLAISSVEAKEDRQGKKDVKIKVAEKKVPKHVREKQETLARWKEAEDGKKKEEEERLRKEEEERRIEEEREREAEEIRQKRKIRKMEKKQEGLILTAKQKRDAAKNEAFRKRVLTDAGSLLVADKNGDSSKRPIYGNKNKLACKKANDPASVQAKGDGETKENHAADEPCTLPDLVSVEDRRVGIIESVDTEETHESVDVSQENGDEEDVWDAKTNFTIKGDSDDEEEKPQPVFKKGLKDTASKAHDSVPGADRPTVKPGGSGKPKTAAKKAMPKVDDTTRPKDTSKKDEGLVLNELAKEVEENLRSPICCIMGHVDSGKTKLLDCIRGTNVQEGEAGGITQQIGATFFPAENIRERTKELQANAKLKVPGILVIDTPGHESFTNLRSRGSNLCDLAILVVDIMRGLEPQTIESLNLLRRRNVKFIIALNKVDRLYGWEKSKNAPIRKTMMQQTGDVVKEFKMRLNRVQNQFQEQGLNSMLYYKNREMGETISILPASAISGEGIPDLLLFLVQWAQKTMVEKLTYVDKVQCTVLEVKVIEGHGITVDVVLVNGVLREGDQIVVCGSQGPIVTTIRSLLTPYPMNEMRVTGTYMPHREVKAAQGIKIAAQGLEHAIAGTALHVIGPNEDMEEAKKNAMEDIESVMNRIDKSGEGVYVQASTLGSLEALLEFLKSSDVKIPVSGIGIGPVHKKDIMKAGVMLEKKKEFATILAFDVKISAEARELADKMGVKIFCDDTIYCLFDKFKSYIEGIKEEKKKETACEAVFPCILQILPNHIYNQRDPIILGVKVNDGILKVGTPICIVKRIENVRVFMDIGRVSSIKNNNNMPVDYARKGQEVAIKIIASNPEEQKMFGRHFGVDDRLISHISSRSVDVIRTNYWNELSNDEKDLVLRLKRIFKIQ

SEQ ID NO: 4111 - protein, 252 aa, Arabidopsis thaliana
MAASTVVTTVTHGASSILPSRTALAVSSRRFSSFSPSRLDFSNLRRRVNAPSPRRLVVRAARTESAGVKLGARAPNFELPEPLTGNLWKLEDFELYPSLLVMFICNHCPFVIHLKKDIVKLCNFYMKKGLAVVAISSNSVVTHPQDGPEFMAEDAKVFKYPFPYLYDESQEVAREFGAVCTPEFFLYKKDGRRPFELVYHGQFDDSRPSSNSPVTGRDLSLAIDLSLSCQPIPSNQKPSVGCSIKWHPETKS

SEQ ID NO: 4112 - protein, 399 aa, Arabidopsis thaliana
MRTLMNSAATMRAVKKEFIVIDLDADKDEDVRCGKVKEEYMMDAGKTNPSNIQQVVSAVASDDDGDDDDDWGTKMDYQYIKLLDSFREDGSLNLSDNPLRSIRYEVDNGGYDKREFKAVFTNKRSREDRNTIRVTKKNVEPKPPHVQASTEKVTKEAGFKLRRRESLVSQKSVEAMLITSHVRRNSQHNNGDASEKENFEDDIVLDEVYRSYLKRLVENSKSSRTNPEKEIKVKCEEDHTVSLSDSDSDIIVVGDCPFLEEEDSPFVPSKSYKVIDLDEESSDQRNSWFRREIMNVLKQPYTVTELKELHKEASVHGVSSRHIELRDGTEFSFPTNKKKPSYLDRYPDFKKQYLDSLREKDERKALNLLRGFIFYITNVVRDDAFKPWLDQECLKIRCV

SEQ ID NO: 4113 - protein, 326 aa, Arabidopsis thaliana
MGDTKVETISRLAQWRIENFGPCSFKKSDPFKVGIWNWHLSIERNRYLSVRLFPELSRVSKEQPPVAKFVLRVSNVGPNRRFYISPVYEKLLRTTDDCVWHVDSSFHGRFTIDVEFLDLKICPVNGGEASPVWPTDATMQSISTQTTLKCLSRMLEESILTDVIIHTADGTLSAHKAILSASSTVFKSMFHHDLMEKESSTIHIDDMSRESCMALLSYLYGNITQEEFWKHRLALLGAANKYDITDLKAACEESLMEDINSSNVLERLQEAWLYQLEKLKKGCLMYLFDFGKIYDVREEISSFFRQADRELMLEMFQEVLSVWKPV

SEQ ID NO: 4114 - protein, 240 aa, Arabidopsis thaliana
MEEDERRDIVMSRASSCMQWSQWQLLDSILPTGGFAHSFGLEAAIQTRLVSSPEDLETHIIHVLDNTASLLLPFVYSALKSPDIETWHKLDGILNATLTNQVSSKASMSQGSALFRIAASVFTEVPNLKMIRDASLGSKNVCFHHAPIFGLVCGLLGMDSETSQRAYLFVTLRDVLSAATRLNIVGPMGASVMQHRIAIVTETVLEKWMNREAGEACQTSPLLDVVQGCHGYLFSRLFCS

SEQ ID NO: 4115 - protein, 98 aa, Arabidopsis thaliana
MGSQENVKHLEECTVSNALGTWVFSVLGALVAIPVGIKRKSLGPLVFFGTTGTMLDIIIGVSQCEREHAEHQMKLLQDSQNATTTTTNTETEESSSMS

SEQ ID NO: 4116 - protein, 119 aa, Arabidopsis thaliana
MAGEEDWIELKFRLADGTDIGPSKYNQSMTVSSLKEKLISQWPKDKENTPKTVNDMKLINAGKILENNRTLAESRLPVCELPGMIITMHIVLRLPTLDKKSEKLQNDPPMKNRCVCTIL

SEQ ID NO: 4117 - protein, 314 aa, Arabidopsis thaliana
MNSDSNKSSSNGFEKSLTPEEYLNKINEVRTLLGPLTEKSSEFCSDAAITRYLAARNGHVKKATKMLKETLKWRAQYKPEEIRWEEIAREAETGKIYRANCTDKYGRTVLVMRPSCQNTKSYKGQIRILVYCMENAILNLPDNQEQMVWLIDFHGFNMSHISLKVSRETAHVLQEHYPERLGLAIVYNPPKIFESFYKMVKPFLEPKTSNKVKFVYSDDNLSNKLLEDLFDMEQLEVAFGGKNSDAGFNFEKYAERMREDDLKFYGNTTVSSTSAHLTNSDSEVSDSEMKYLEDKEDETIENGTLQSPLDTTKT

SEQ ID NO: 4118 - protein, 261 aa, Arabidopsis thaliana
MTTSMDFYSNKTFQQSDPFGGELMEALLPFIKSPSNDSSAFAFSLPAPISYGSDLHSFSHHLSPKPVSMKQTGTSAAKPTKLYRGVRQRHWGKWVAEIRLPRNRTRLWLGTFDTAEEAALAYDKAAYKLRGDFARLNFPDLRHNDEYQPLQSSVDAKLEAICQNLAETTQKQVRSTKKSSSRKRSSTVAVKLPEEDYSSAGSSPLLTESYGSGGSSSPLSELTFGDTEEEIQPPWNENALEKYPSYEIDWDSILQCSSLVN

SEQ ID NO: 4119 - protein, 179 aa, Arabidopsis thaliana
METTKSNSSESDVNAKWDACLDLTARRFVYSSLGGAFAGLLFFRSPVTRWASIAFGAGIGIGSAYTDCSRVFDASSSTSATLLAAPKSTETSVSQVSRNLLRGKYDLEEWQQKSEDNEEAWSVVLYTDVKIVNDPLIFFVLKNLMFFYLRNNSSGLICLPLLFLHSSNNLLTYRLSYRF

SEQ ID NO: 4120 - protein, 141 aa, Arabidopsis thaliana
MLLYKKKNQIVKGNRILISVTFLGSAGPIRFVANEGDLVASVIDTALKCYAREGRLPILGSDFNDFVFYCPMVGPGALSPWEAIGSVGVRNFMLCKKKPEEKKVEEDKGRSNFPINGARKGAGGSFKAWINKSLRLKVTTH

SEQ ID NO: 4121 - protein, 261 aa, Arabidopsis thaliana
MAALLGIVSPVTFTGKHPVNSRSRRRTVVKCSNERRILFNRIAPVYDNLNDLLSLGQHRIWKNMAVSWSGAKKGDYVLDLCCGSGDLAFLLSEKVGSTGKVMGLDFSSEQLAVAATRQSLKARSCYKCIEWIEGDAIDLPFDDCEFDAVTMGYGLRNVVDRLRAMKEMYRVLKPGSRVSILDFNKSNQSVTTFMQGWMIDNVVVPVATVYDLAKEYEYLKYSINGYLTGEELETLALEAGFSSACHYEISGGFMGNLVAMR

SEQ ID NO: 4122 - protein, 556 aa, Arabidopsis thaliana
MSPFLKFFLFLYDYLSPSSFFLVQRNTLGASLDTTDGVVRSGIIGEIIYIWKQTRIFVFIPILKCLVTICLVMSLLLFIERVYMSIVVVFVKLLRRTPEKVHKWEPINDDDLELANTNYPMVLIQIPMYNEKEVCQLSIGAACRLSWPLDRMIVQVLDDSTDPASKELVNAECDKWARKGINIMSEIRDNRIGYKAGALKAGMMHNYVKQCEFVAIFDADFQPDPDFLERTIPFLIHNHEISLVQCRWKFVNANECLMTRMQEMSLNYHFVAEQESGSSIHAFFGFNGTAGVWRIAALNEAGGWKDRTTVEDMDLAVRACLHGWKFVYVHDVEVKNELPSTFKAYRFQQHRWSCGPANLWRKMTMEILQNKKVSAWKKLYLIYNFFFIRKIVVHIFTFVFYCLILPTTVLFPELQVPKWATVYFPTTITILNAIATPRSLHLLVFWILFENVMSMHRTKATFIGLLEAGRVNEWVVTEKLGDTLKSKLIGKATTKLYTRFGQRLNWRELVVGLYIFFCGCYDFAYGGSYFYVYLFLQSCAFFVAGVGYIGTFVPTV

SEQ ID NO: 4123 - protein, 258 aa, Arabidopsis thaliana
MSTESYEDAIKRLGELLSKKSDLGNVAAAKIKKLTDELEELDSNKLDAVERIKSGFLHFKTNNYEKNPTLYNSLAKSQTPKFLVFACADSRVSPSHILNFQLGEAFIVRNIANMVPPYDKTKHSNVGAALEYPITVLNVENILVIGHSCCGGIKGLMAIEDNTAPTKTEFIENWIQICAPAKNRIKQDCKDLSFEDQCTNCEKEAVNVSLGNLLSYPFVRERVVKNKLAIRGAHYDFVKGTFDLWELDFKTTPAFALS

SEQ ID NO: 4124 - protein, 375 aa, Arabidopsis thaliana
MHFPLVSAWNKRRRSKSYDTDPCTFLFSIIFARWHKRVYRTAECWQIEDQASQPRKRRFGSSVYTLKEMEEATSSFSDENLLGKGGFGRVYQGTLKTGEVVAIKKMDLPTFKKADGEREFRVEVDILSRLDHPNLVSLIGYCADGKHRFLVYEYMQNGNLQDHLNGIKEAKISWPIRLRIALGAAKGLAYLHSSSSVGIPIVHRDFKSTNVLLDSNYNAKISDFGLAKLMPEGKDTCVTARVLGTFGYFDPEYTSTGKLTLQSDIYAFGVVLLELLTGRRAVDLTQGPNEQNLVLQVRNILNDRKKLRKVIDVELPRNSYSMEAITMFADLASRCIRIESKERPSVMDCVKELQLIIYTNSKGGLGGTIPTFRRL

SEQ ID NO: 4125 - protein, 535 aa, Arabidopsis thaliana
MALAFDEFGRPFIILREQDQKTRLRGIDAQKANIAAGKAVARILRSSLGPKGMDKMLQGPDGDITITNDGATILEQMDVDNQIAKLMVELSRSQDYEIGDGTTGVVVMAGALLEQAERQLDRGIHPIRIAEGYEMASRVAVEHLERIAQKFEFDVNNYEPLVQTCMTTLSSKIVNRCKRSLAEIAVKAVLAVADLERRDVNLDLIKVEGKVGGKLEDTELIYGILIDKDMSHPQMPKQIEDAHIAILTCPFEPPKPKTKHKVDIDTVEKFETLRKQEQQYFDEMVQKCKDVGATLVICQWGFDDEANHLLMHRNLPAVRWVGGVELELIAIATGGRIVPRFQELTPEKLGKAGVVREKSFGTTKERMLYIEHCANSKAVTVFIRGGNKMMIEETKRSIHDALCVARNLIRNKSIVYGGGAAEIACSLAVDAAADKYPGVEQYAIRAFAEALDSVPMALAENSGLQPIETLSAVKSQQIKENIPFYGIDCNDVGTNDMREQNVFETLIGKQQQILLATQVVKMILKIDDVISNSEY

SEQ ID NO: 4126 - protein, 445 aa, Arabidopsis thaliana
MSFRGIVQDLRDGFGSLSRRSFDFRLSSLHKGKAQGSSFREYSSSRDLLSPVIVQTSRWANLPPELLFDVIKRLEESESNWPARKHVVACASVCRSWRAMCQEIVLGPEICGKLTFPVSLKQPGPRDAMIQCFIKRDKSKLTFHLFLCLSPALLVENGKFLLSAKRTRRTTRTEYIISMDADNISRSSNSYLGKLRSNFLGTKFLVYDTQPPPNTSSSALITDRTSRSRFHSRRVSPKVPSGSYNIAQITYELNVLGTRGPRRMHCIMNSIPISSLEPGGSVPNQPEKLVPAPYSLDDSFRSNISFSKSSFDHRSLDFSSSRFSEMGISCDDNEEEASFRPLILKNKQPRWHEQLQCWCLNFRGRVTVASVKNFQLVAARQPQPQGTGAAAAPTSAPAHPEQDKVILQFGKVGKDMFTMDYRYPLSAFQAFAICLSSFDTKLACE

SEQ ID NO: 4127 - protein, 323 aa, Arabidopsis thaliana
MSLLNQLFNRGIFGAKCKTSLNLAIARMKLLQNKRDMQLKHMKKEIAHFLQAGQEPIARIRVEHVIREMNLWAAYEILELFCEFILARVPILESEKECPRELREAIASIIFAAPRCSEVPDLLQIKNLFGTKYGKEFIMVASELRPDSGVNRTIIEKLSPTSPSGAARLKMLKEIAQEYSLNWDSSATEAEFMKSHEDLLGGAKQIHRQDGISESRPSQQGYGQSSVSREVESLPAEATQRFQKLQAQNPVSKSMPSSKLTSAFQAPPDTRRNQTDVMEIARAALASADRATAAARAAAQLVNVSYGATTPTVAAEGKPLNLM

SEQ ID NO: 4128 - protein, 287 aa, Arabidopsis thaliana
MKSFVKPERDSLLRTVRIVFTDPDATDDSSSSSDEWLPKPRKVKRFVHEITFLPQVSESSQDRSNAVKTPRRKSTRQFKYPVGVRPRPSGKFAAEILNPFTKTKKWLGTYETPAEAEKAYVDKKVEYDALASSGSAVSSSVVTVTSQCLRSPTSASVSCVSADDLSKEKTSLNKDVAASGDSTTKEVFTTFDFSDVKIPDLRFLAAEEDSMVSNANGAELDFDCFLTDSNILLDDYSLLENDINFSRFENSLPSELPDCDFTEMEFQLDDFKFAYTDHLTTPPLGLV

SEQ ID NO: 4129 - protein, 488 aa, Arabidopsis thaliana
MSDSTNSVSPSSDYASISSGDQSLQRSRRSGDGNRAVVRESRHWHDVFWSAIFVIHLICLGFVLAVLGLNRFRISDRLNIDRYTQGFLENHKGLTEDYWPLYAVAGGIGVFISWVWSLLLGSYANEMMKVSVHILTTYLAVVSVLCFWCRLFFWGGAFAVGSLLQFLYVISVIDRLPFTMLVLRKALKLVWGLPKVIMVAHAFTVVMLLWMSLWSFGAAGVVASSMGDEGRWWLLVVLSVSLFWTGAVLCNTVHVIVSGMVFHVLFHCGQEESSSLPPSSLVDSLRYAVTTSFGSICYGSLFTAAIRTLRWEIRGFRSKICGNECLLCCVDFLFHLVETLVRFFNKYAYVQIAVYGKGFNKSARDAWELFQSTGVEALVAYDCSGAVLLMGTIFGGLITGSCIGIWAWIKYSDRVIMVASTAMLMGMVLVGLGMVVVESAVTSIYICFAEDPLLIQRWDADFYTEMSEVLHRRLQHRSSRAREVLTTA

SEQ ID NO: 4130 - protein, 762 aa, Arabidopsis thaliana
MTTPAQAPREEVSLSPSLASPPLMALPPPQPSFPGDNATSPTREPTNGNPPETTNTPAQSSPPPETPLSSPPPEPSPPSPSLTGPPPTTIPVSPPPEPSPPPPLPTEAPPPANPVSSPPPESSPPPPPPTEAPPTTPITSPSPPTNPPPPPESPPSLPAPDPPSNPLPPPKLVPPSHSPPRHLPSPPASEIPPPPRHLPSPPASERPSTPPSDSEHPSPPPPGHPKRREQPPPPGSKRPTPSPPSPSDSKRPVHPSPPSPPEETLPPPKPSPDPLPSNSSSPPTLLPPSSVVSPPSPPRKSVSGPDNPSPNNPTPVTDNSSSSGISIAAVVGVSIGVALVLLTLIGVVVCCLKKRKKRLSTIGGGYVMPTPMESSSPRSDSALLKTQSSAPLVGNRSSNRTYLSQSEPGGFGQSRELFSYEELVIATNGFSDENLLGEGGFGRVYKGVLPDERVVAVKQLKIGGGQGDREFKAEVDTISRVHHRNLLSMVGYCISENRRLLIYDYVPNNNLYFHLHAAGTPGLDWATRVKIAAGAARGLAYLHEDCHPRIIHRDIKSSNILLENNFHALVSDFGLAKLALDCNTHITTRVMGTFGYMAPEYASSGKLTEKSDVFSFGVVLLELITGRKPVDASQPLGDESLVEWARPLLSNATETEEFTALADPKLGRNYVGVEMFRMIEAAAACIRHSATKRPRMSQIVRAFDSLAEEDLTNGMRLGESEIINSAQQSAEIRLFRRMAFGSQNYSTDSLTRNSYISKDENL

SEQ ID NO: 4131 - protein, 611 aa, Arabidopsis thaliana
MAFSQAALSALPLSDRTFRKKPSSSSSSSPNFVLRVRAAAKEVHFNRDGSVTKKLQAGADMVAKLLGVTLGPKGRNVVLQNKYGPPRIVNDGETVLKEIELEDPLENVGVKLVRQAGAKTNDLAGDGSTTSIILAHGLITEGIKVISAGTNPIQVARGIEKTTKALVLELKSMSREIEDHELAHVAAVSAGNDYEVGNMISNAFQQVGRTGVVTIEKGKYLVNNLEIVEGMQFNRGYLSPYFVTDRRKREAEFHDCKLLLVDKKITNPKDMFKILDSAVKEEFPVLIVAEDIEQDALAPVIRNKLKGNLKVAAIKAPAFGERKSHCLDDLAIFTGATVIRDEMGLSLEKAGKEVLGTAKRVLVTKDSTLIVTNGFTQKAVDERVSQIKNLIENTEENFQKKILNERVARLSGGIAIIQVGALTQVELKDKQLKVEDALNATKSAIEEGIVVGGGCALLRLATKVDRIKETLDNTEQKIGAEIFKKALSYPIRLIAKNADTNGNIVIEKVLSNKNTMYGYNAAKNQYEDLMLAGIIDPTKVVRCCLEHASSVAQTFLTSDCVVVEIKEIKPRPIINPPLPTSSPATSSMFPDRKLPRFPQIMPRTRSHFPRK

SEQ ID NO: 4132 - protein, 413 aa, Arabidopsis thaliana
MMIAQELGIYVVESKGGAILCLLLSLLCLGTWPALMALLERRGRLPQHTYLDYSITNFLAAIFIAFVFGGIGESTHEAPSFITQLTQIQDNWPSVLFAMAGGVGLSIGNLATQYSLAFVGLSVTEVTAASITVVVGTTVNYFLDNGLNRADILFSGVGCFMVAVCLGSAVHSSNSADIKAKLGKLSGDCETVTPEECQRLFGVEEEEEEEKEMENVKEGSAAFLIALENKRAIKVLGKSMVVGLGITFFAGLSFSLFSPLFNLATNDQWHTLKQGVPKLIVYTAFFYFSLSCFVIAVALNISFLYKPVLDSPRSSFREYLSDWNGRGWALAAGLLCGFGNGLQFMGGQAAGYAASDAVQALPLVSTFWGIYLFGEYRRSSTRTYALLVGMLVMFTVAVGLLMASAGERETRFT

SEQ ID NO: 4133 - protein, 374 aa, Arabidopsis thaliana
MLKEEAEGVKMEDDDEEPPMAVQIHPDVSVGKVHSSSDTVSVGVSVITGYLGAGKSTLVNYILNGKHGKRIAVILNEFGEEIGVERAMINEGEEGAIVEEWVELANGCVCCTVKHSLVQALEQLVQRKDRLDHILLETTGLANPAPLASILWLDDQLESEVKLDCIVTVVDAKNLRFQLNERRDSSSFPEAFNQIAFADTIIMNKVDLISQEESDELEKEIHSINSLANVIRSVRCQVDLSNILNCQAYDSTHVSRLESLLEANKSLTTTDLHDSGVRTLCISEPQPINLDKVRLWLEEILWDKKSEMDVYRCKAVLSIQNSDQMHILQAVRDIYEIVPARKWSEEENRTNKIVFIGHKLDEEVLRSGLRDCRP

SEQ ID NO: 4134 - protein, 178 aa, Arabidopsis thaliana
MGRTKKPQKFAVMKMMISHKALKHYKEEVLNPNKKDLTELPRNVPSVPSGLFFSHNSSLVPPYRVLVDTNFINFSIQNKIDLEKGMMVFVRKMHSLYYGLIAKDPRFERLPCVLKGTYADDCLVDRVTQHKCFIVATCDRDLKRRIRKIPGVPIMYVTQRKYSIEKLPEATIGGAPRY

SEQ ID NO: 4135 - protein, 177 aa, Arabidopsis thaliana
MEEGRQKDLQLLEEIIDKGLKQKLVHATASRFRFIVVSAFVGFAGTRSLKNKKHCILLYREDSSFSSDLRKNLETLEKNGVNSLKTRVNLGSEVYMQAEVPDTRHIFMDVGLGFYVEFTRQEALDYIAQREERTQKQLEEYTGVITQIKGRIKLAHYQIQQILNLPEENPSSRQRAF

SEQ ID NO: 4136 - protein, 616 aa, Arabidopsis thaliana
MALKSSSADGKTRSSVQIFIVFSLCCFFYILGAWQRSGFGKGDSIALEMTNSGADCNIVPSLNFETHHAGESSLVGASEAAKVKAFEPCDGRYTDYTPCQDQRRAMTFPRDSMIYRERHCAPENEKLHCLIPAPKGYVTPFSWPKSRDYVPYANAPYKALTVEKAIQNWIQYEGDVFRFPGGGTQFPQGADKYIDQLASVIPMENGTVRTALDTGCGVASWGAYLWSRNVRAMSFAPRDSHEAQVQFALERGVPAVIGVLGTIKLPYPTRAFDMAHCSRCLIPWGANDGMYLMEVDRVLRPGGYWILSGPPINWKVNYKAWQRPKEDLQEEQRKIEEAAKLLCWEKKYEHGEIAIWQKRVNDEACRSRQDDPRANFCKTDDTDDVWYKKMEACITPYPETSSSDEVAGGELQAFPDRLNAVPPRISSGSISGVTVDAYEDDNRQWKKHVKAYKRINSLLDTGRYRNIMDMNAGFGGFAAALESQKLWVMNVVPTIAEKNRLGVVYERGLIGIYHDWCEAFSTYPRTYDLIHANHLFSLYKNKCNADDILLEMDRILRPEGAVIIRDDVDTLIKVKRIIAGMRWDAKLVDHEDGPLVPEKVLIAVKQYWVTNSTSTH

SEQ ID NO: 4137 - protein, 694 aa, Arabidopsis thaliana
MLCACSGEQFRFEDQPGSPESLATRDFSASGLSSRNGGGDWDSKLEDIQVDEAESTLKEALSLNYEEARALLGRLEYQRGNFDAALQVFKGIDIKVLTPRIIKAIVEKTLPCKPRSKAVIVPPTTMSMHSVSLLLEAILLKARSLEELGSYKEAAEECKIILDVVENALPSGMPDGISGFAKLQDIFQKALELLPLLWKKAGNHHETIASYRRALSRPWNLDPQRLAVTQKSLALVLLYGSVEACPKDNIEEAIVLLMLLVKKMVVGDIQWDPELMDHLTYALSMTGQFEVLANYLEQTLPGVYTRGERWYLLSLCYSAAGIDKAAINLLKMALGPSESRQIPHIPLLLFGAKLCSKDPKHSRDGINFAHRLLDLGNSQSEHLLSQAHKFLGVCYGNAARSSKLDSERVFLQKKSLFSLNEAAKRGKADPELDVIFNLSVENAVQRNVQAALDGAVEYSSMVGGVSTKGWKHLAIVLSAEKRLKDAESILDFTMEEAGDIEKIELLRLKAVLQMAQEQPKKAMKTCSSLLGLIRAQEKSEQSESLLQKFETEAWQDLASVYGKLGSWSDAETCLEKARSMCYYSPRGWNETGLCLEAKSLHEEALISFFLSLSIEPDHVPSIVSIAEVMMKSGDESLPTAKSFLMNALRLDPRNHDAWMKLGHVAKKQGLSQQAAEFYQAAYELELSAPVQSFI

SEQ ID NO: 4138 - protein, 441 aa, Arabidopsis thaliana
MGRKSQRKNATMFDSDDDTSSVSSSSTMPSERLLNPGMDEVTVLKDALLDQSLDALYEKRSSTREQALATIVDAFNSDLQYEFVEKKFATLLHQCLHCTKKGSTKETSLATHVIGLLALTVGLGDHAQEVLEESVTPLSQALKSGREILKITSILECLAVITFVGGNDPEQTEKSMQIIWQMIHPKLGSNVVATKPSPAVISAVVSSWAFLLTTVDRWTLGPKIFQETVTYLSTLLEKDDRSVRIAAGEALAVIYELGTLEKFAAEVKGSANGSVKEGGVSQEALMHMHGLKAKVTKQVRELSVEAGGKGSAKKDLNTQRNLFKDLVEFLEDGYAPETSTKVGGDYLQTSTWYQMIQLNYLKHFLGGGFIKHMQENEFLHDVFSFTPKKIGGGKLSNDEKRLFKSPNSALNKARTQFLAKQRMLAKNMNVGHYAATAMEEE

SEQ ID NO: 4139 - protein, 451 aa, Arabidopsis thaliana
MWEAIKDRETGRIRSNSFANRFKSRRILSLQLSNRKDFVSPHRGSVNSLQVDLTEGRYLLSGAADGSAAVFDVQRATDYEASGLIAKHKCIFTVDKQHENGHKYAISSAIWYPIDTGLFITGSFDHYLKVWDTNTAQAVVDFKMPGKVYRTAMSSMAMSHTLIAAGTEDVQVRLCDIASGAFSHTLSGHRDGVMSVEWSTSSEWVLYTGGCDGAIRFWDIRRAGCFRVLDQSQTQLGFRPPILKRTAVGSKLSSVAKSSLGGQNRLKTLQSKQTGSQSVKGSSSAKASVEKSRQKRIHPGMLSTLDRATAHYGAVTGLKATNDGMYLLSAGSDSRIRLWDIESGRNTLVNFETGRIQTNKGIQLDTSDDPALVFVPCMKTVKVAFGMWSGRTTLMLRGHYESVNTCCFNSNDQELYTSGSDRQILVWSPGGTVEDEMVQDEVAEDKDNWSD

SEQ ID NO: 4140 - protein, 1148 aa, Arabidopsis thaliana
MPPSPALRCSPGRELPGKKHRRGHSIEYGILFRDKDDDLALFSEMQDKERDSFLLQSSDDLEDVFSTKLKHFSEFTIPVQGESSRLLTAEGDKNDYDWLLTPPDTPLFPSLDDQPPAASVVRRGRPQSQISLSRSSTMEKSRRSSKGSASPNRLSTSPRADNMQQIRGRPSSARHPSPASGRRSGTPVRRISPTPGKPSGPVSRSPTPTSRRMSTGSTTMASPAVRGTSPVSSSRGNSPSPKIKVWQSNIPGFSLDAPPNLRTSLGDRPASYVRGSSPASRNGRDAVSTRSRKSVSPSASRSVSSSHSHERDRFSSQSKGSVASSGDDDLHSLQSIPVGGSERAVSKRASLSPNSRTSRSSKLLSPGSAPRRPFESALRQMEHPKSHHSMFRPLASSLPSTGIYSGKGSSSYHHIMLRHSTATVGSNSSSGQVTGFMPDAKGMDPVPVFQSEVENLAYPDKHEESIAFGMVNLSNESSRHESHESSFSDQLGDMDQDYTVECESSANEEVSHQVFDVENSSTHGSLHVGNEFLEGVALETMEVCGRCGSHYCATEATRSEINICPECREEHSFVETDSPGTNSPKLSQTIFDENKLYFENIPVIDVLDSLPVVMVEEEILETPEKIEQCDNSYEQEQYHLYESSISRALEEQNVDMLNYKDGTQSSTGCGPLSIGTKDTQTQLSDKHHDVNIGSLGRGDVPLVIKRSVSMKSPVIQANNSSCFTRSYEGFSYSRDRSISLRSSTETASASSSWDYGSSIRKGSHIRQRSGSTLDLETHRYDTNSKSLSTMSSSSGMSSHTFQALNVMPEDSFEMCAAQMTCTLDETHQESHTEPQNLECKETNVMNADFVESVGLVRISANVLGDLAEHNPVVMDDECCENGNDVANTVISKGETRESPAHIRSTSDLGASPITDDCPFNDHSRLQENDVNETPHGLSTTTASEIEPESSEPEIPGLGVHDEIPESERNLNAVDDCSEKSMVHASVDHHSSSAPVNEILDESTVLVECPGGKEPRSLTLEEATDTILFCSSIVHDLVYQAATIAMDKAKDVPAEEEMLHPTVTVLGKSNANRNSYGLGGGTKAKKRSSKAAKASRKQTETEEKTEVQIENDENAGEAVMMRNVGVPPSKGENMKPPPNLESKCNCSIM

SEQ ID NO: 4141 - protein, 541 aa, Arabidopsis thaliana
MFNKLSSMAYGSFGVSSKALVYCRPCYGSIRDLPFSLRTSTIGHCGCVGAIAAPRNVVKPRKEESRDFSGARGSNKDKSMPWKKLDANEFGIQRSMIPDSTRMVLNKLKKKGFQVYLVGGCVRDLILDRIPKDFDVITTAELKEVRKVFPGCQIVGRRFPICHVYVDDIIIEVSSFSTSARTGKAPNKSFRRPAGCDERDYIRWKNCLQRDFTVNGLMFDPSENVVYDYIGGVEDLRNSKVRTVSAANLSFVEDTARILRAIRIAARLGFSLTKDVAISVKELSSSLLRLDPSRIRMEINYMLAYGSAEASLRLLWRFGLMEILLPIQASYLVSQGFRRRDGRSNMLLSLFRNLDRLVAPDRPCSEFLWIGILAFHKALVDQPRDPTVVASFCLAIYSEVSLSEAIAIARSNSKQHNSHFQELSSPEKDTADSESKISQQVIKLAESIRSAARKLNNRDYIANAMSKYPQAPGSDMVFLSRLMLERVEKMFGNVRRKGNQERDDVPSLERRINYKSLALGDFHETRRVFARIVFDTIYPLA

SEQ ID NO: 4142 - protein, 51 aa, Arabidopsis thaliana
MELITLLLAVLPLTPTVDRNRNVSRQSKPRAQARKPGKRERAHSSKVRSSE

SEQ ID NO: 4143 - protein, 880 aa, Arabidopsis thaliana
MEANSADQKQKPNFLVEVNNIEKQLWTLIHSKTILHTDVSELYAKAGSTYEQIFKSNLQHEELQEVEFCLWKLHYKHIDEFRKGLKTNDHAKHMKAFKLFLSKAAEFYQNLISKVRGYYHRLSEESGEQKSRFLCHRFYICLGDLQRYQEQYLKAHEHPNWSTAATYYLEAAKSWPDSGNPHNQLAVLATYVSDELLALYHCVRSLAVKEPFPGASNNLLLLFEKNRSSPLQSLSTDAEFNYLNPSEKKVSVKERDLSKAKGELVAGIDLWPLVVRTTSFFFLKSSFDEFGRAFASTIRELDAAFAADDRNLEAMLESYQFMDTARKGPYKILQIVAVFIYIFHNLAEANGSDIVKEEVKLTNLALTMVFIVMGRVVERCLKTTPLDSCPLLPALLVFLDYLPFLLDKVEEEEEECRFDEKSKSAISYFFGKLVDILNQLKVKDKNCPAKTLLALWEDHELKSLAPLAPIHALLDFSSNMDLRESFDRGKELRLQRIISSAIDITTRQKKGSQKWLFFDNQRTHFYTTSGELQSNGELFHGNGEGRNRKCVTIGPVEIIPLENERSVPVEEEEVILLKPLVRCQSAPIYSSGIAAKPLSSDCTTSGNQTTTSNDSLRRTLSLIGSESFSFTQGLKDTDPQHLHLEEGTVSGRPPSLSAWVVDKNKEKGRLGLSKPNGLGPIDETGPVSAFDSLSINSSTEHPASSYSPPTPSAPLLPEDASWFHNDASTNKAESFYDQTRYMELPGIMKPYTNPPFVGISSSEWLRRYRESRNLGPAYSYQAQGTNNLRNFMAHGSSKFSLLARYGTPNDSSQNSTFHPQLYMEDHESRGEKLGNVQQSTTNPYGFSDDPGPFLRFLREKEWLNENGQRLRGPPPAYMNN

SEQ ID NO: 4144 - protein, 386 aa, Arabidopsis thaliana
MAMKEAFPEDYLSQEELEPSLNVSHHRASSQYISKVFENPLAGRAKRKRTVKNTEVKKRTLKNTEVMKMTEKKTEEAYLVKVEQLAKLKQKQEEDKAAVTLHCFSKTSETGKDVVAPPEGFEQMQSLRFIDNNYTKLKPSDIQGQVDPLFPEVILCVEIYNSRKVKTQEFLVLGRQMLTELKDNIHCATDQVMQKAGKYDPSGYFLIEDVFHNDLRNPSAKDYSYPILDWLWNSKDEALKKWECVLTGELQKKQKLVLGEAKSVDLPRYRTADMQSTHFCDIRFRVGASYVYCHQGDCKHTIVIRDMRMSHPEDVQNRAAYPIMFWPKRRIQKCGVCKIKRASKVAVDDKWASENSSYFCDVCFELLHSEEGPLNCDFPVFDYVHE

SEQ ID NO: 4145 - protein, 390 aa, Arabidopsis thaliana
MAYPGSPILMKLLVFIFLSTFVVTNVSSETKCREFKSIISFGDSIADTGNLLGLSDPKDLPHMAFPPYGENFFHHPTGRFSNGRLIIDFIAEFLGLPLVPPFYGSHNANFEKGVNFAVGGATALERSFLEDRGIHFPYTNVSLGVQLNSFKESLPSICGSPSDCRDMIENALILMGEIGGNDYNYAFFVDKGIEEIKELMPLVITTISSAITELIGMGGRTFLVPGEFPVGCSVLYLTSHQTSNMEEYDPLTGCLKWLNKFGENHGEQLRAELNRLQKLYPHVNIIYADYYNALFHLYQEPAKFGFMNRPLSACCGAGGPYNYTVGRKCGTDIVESCDDPSKYVAWDGVHMTEAAYRLMAEGILNGPYAIPPFDWSCRSSGVKNSGSSDT

SEQ ID NO: 4146 - protein, 340 aa, Arabidopsis thaliana
MPSFNSSGNLAVAVALLFAGALYFYFSSITVSDPMSDLLHNVETRWTEYPVDELEAVLDKAAMGNNKTVIIAMVNKAYVEEVEGGRTMLDLFLESFWEGEGTRPLLDHLMLVAADQTSYDRCLFRRLHCYKMDTDGVDLEGEKVYMSKDFIEMMWRRTHLLLDVLSRGYNLTFTDTDVMWLRSPFPRLSYNESLDMQISVDSIGLVGGHLINTGFYHVRSNNKTISLFQKWYDMRLKSTGMKEQDVLKSLLDSGFFNQLGLNVGFLNTTEFSGFCQDSHDMGVVTTVHANCCRHILAKISDLTLVLRDWKRYKASHVNSNWSPHVECGRSWSDTHYIPKL

SEQ ID NO: 4147 - protein, 456 aa, Arabidopsis thaliana
MSTASSWIQQPPFRYLPDRGGFSKPSSRSARQFSSGVVSASASSPSPSSSCSCGYSEILNFDFGSNRSWNQQGRRVQAMSSTAQRKFSLSKGDSDDKNEPDHLLVLVHGILASPSDWLYVEAELKRRLGRRFLIYASSSNTFTKTFGGIDGAGKRLAEEVRQVVQKSKSLKKISFLAHSLGGLFSRHAVAVLYSAAMAQVSDVAVSQSGNSNLLRGRIAGLEPINFITLATPHLGVRGRKQLPFLLGVPILEKLAAPIAPFFVGRTGSQLFLTDGKADKPPLLLRMASDGEDLKFLSALGAFRSRIIYANVSYDLDMVGWRTSSIRRETELIKPSRRSLDGYKHVVDVEYCPPVSSDGAHFPPEAAKAKEAAQSSPSPQNTLEYHEIVEEEMIRGLQRLGWKKVDVSFHSTFWPYLAHNNIHVKSERLYKAGAGVIAHVADSIKQQESSTFITASL

SEQ ID NO: 4148 - protein, 226 aa, Arabidopsis thaliana
MASLCLSSSRIVSLHHQKPFLALKLRPRPSNISGLGHSTSVVCFNPLRLSADRQRTATVSARAEKRRKRGSSVVCYATPMLSVHNLQWISTISCVALMFARGTGIHKSFVVPLFALQAPMGIVSWMKGEYGIWAAFLALLTRLFFSFPVELELPFIALLLVIVAPYQVMSIRGKQEGAILSLAISCFLAFQHFSRAGTLQKAFDQNSVLATVAIIGVTVVSFLFLI

SEQ ID NO: 4149 - protein, 36 aa, Arabidopsis thaliana
MGFTLVFTGLSESAQVLIGLSGVTPICIMNSYVIFL

SEQ ID NO: 4150 - protein, 584 aa, Arabidopsis thaliana
MDPVDMVVSQPITPGQVSFLLGVIPLMIAWLYSEFLEYRRSSFHAKVHSDKNLVELEMVTNKEDEGTVLMEGGLPRSASSKFYSSPIKTNLIRFLTLEDSFLLENRATLRAMAEFGAILLYFYICDRTSLIGQSQKNYSRDLFLFLFCLLIIVSAMTSLKKHTDKSPITGKSILYLNRHQTEEWKGWMQVLFLMYHYFAAVEFYNAIRVFIAGYVWMTGFGNFSYYYIRKDFSLARFTQVRSTIFDHHSLFSLPCDVLLESTMSFKAQDFYESFYLIQMMWRLNFFVAFCCIILNNDYMLYYICPMHTLFTLMVYGALGIYSQYNEIASVMALKIASCFLVVILMWEIPGVFEIFWSPLAFLLGYTDPAKPDLPRLHEWHFRSGLDRYIWIIGMIYAYFHPTVERWMEKLEECDAKRRMSIKTSIIGISSFAGYLWYEYIYKLDKVTYNKYHPYTSWIPITVYICLRNCTQQLRRFSLTLFAWLGKITLETYISQFHIWLRSSVPNGQPKLLLSIIPEYPMLNFMLTTAIYVLVSVRLFELTNTLKSVFIPTKDDKRLLHNVIAMAAISFCLYIIGLILLLIPH

SEQ ID NO: 4151 - protein, 251 aa, Arabidopsis thaliana
MQNNQFPHFSDEVGDRNMHNPYASGSSYDALFPPCAKLPYHGVELQPSAVCPKNFVIFDQTYDRSQVMYHPELTHKLMNTPSLNNLASTFQNEYVGGSYGNYGNYEQEVSSSYQEDPNEIDALLSADEDYEENDDNEGEEDGGDSEEVSTARTSSRDYGNTTAESCCSSYGYNNNNNNNSRKQSLSGSASSSNNDGKGRKKMKKMMGVLRRIVPGGEQMNTACVLDEAVQYLKSLKIEAQKLGVGHFSNQS

SEQ ID NO: 4152 - protein, 324 aa, Arabidopsis thaliana
MEVDEDIELQKHQEQQSRKLQRFSEDNTGLMRNWNNPSSRIIRVSRASGGKDRHSKVLTSKGLRDRRIRLSVATAIQFYDLQDRLGFDQPSKAVEWLINAASDSITDLPLLNTNFDHLDQNQNQTKSACSSGTSESSLLSLSRTEIRGKARERARERTAKDRDKDLQNAHSSFTQLLTGGFDQQPSNRNWTGGSDCFNPVQLQIPNSSSQEPMNHPFSFVPDYNFGISSSSSAINGGYSSRGTLQSNSQSLFLNNNNNITQRSSISSSSSSSSPMDSQSISFFMATPPPLDHHNHQLPETFDGRLYLYYGEGNRSSDDKAKERR

SEQ ID NO: 4153 - protein, 482 aa, Arabidopsis thaliana
MASRTTPSRSTPSRSTPSGSSSGGRTRVGKYELGRTLGEGTFAKVKFARNVENGDNVAIKVIDKEKVLKNKMIAQIKREISTMKLIKHPNVIRMFEVMASKTKIYFVLEFVTGGELFDKISSNGRLKEDEARKYFQQLINAVDYCHSRGVYHRDLKPENLLLDANGALKVSDFGLSALPQQVREDGLLHTTCGTPNYVAPEVINNKGYDGAKADLWSCGVILFVLMAGYLPFEDSNLTSLYKKIFKAEFTCPPWFSASAKKLIKRILDPNPATRITFAEVIENEWFKKGYKAPKFENADVSLDDVDAIFDDSGESKNLVVERREEGLKTPVTMNAFELISTSQGLNLGSLFEKQMGLVKRKTRFTSKSSANEIVTKIEAAAAPMGFDVKTNNYKMKLTGEKSGRKGQLAVATEVFQVAPSLYMVEMRKSGGDTLEFHKFYKNLTTGLKDIVWKTIDEEKEEGTDGGGTNGAMANRTIAKQST

SEQ ID NO: 4154 - protein, 935 aa, Arabidopsis thaliana
MRLSSAGFNPQPHEVTGEKRVLNSELWHACAGPLVSLPPVGSRVVYFPQGHSEQVAASTNKEVDAHIPNYPSLHPQLICQLHNVTMHADVETDEVYAQMTLQPLNAQEQKDPYLPAELGVPSRQPTNYFCKTLTASDTSTHGGFSVPRRAAEKVFPPLDYSQQPPAQELMARDLHDNEWKFRHIFRGQPKRHLLTTGWSVFVSAKRLVAGDSVLFIWNDKNQLLLGIRRANRPQTVMPSSVLSSDSMHLGLLAAAAHAAATNSRFTIFYNPRASPSEFVIPLAKYVKAVYHTRVSVGMRFRMLFETEESSVRRYMGTITGICDLDPTRWANSHWRSVKVGWDESTAGERQPRVSLWEIEPLTTFPMYPSPFPLRLKRPWPPGLPSFHGLKEDDMGMSMSSPLMWDRGLQSLNFQGMGVNPWMQPRLDTSGLLGMQNDVYQAMAAAALQDMRGIDPAKAAASLLQFQNSPGFSMQSPSLVQPQMLQQQLSQQQQQLSQQQQQQQQLSQQQQQQLSQQQQQQLSQQQQQQLSQQQQQQAYLGVPETHQPQSQAQSQSNNHLSQQQQQVVDNHNPSASSAAVVSAMSQFGSASQPNTSPLQSMTSLCHQQSFSDTNGGNNPISPLHTLLSNFSQDESSQLLHLTRTNSAMTSSGWPSKRPAVDSSFQHSGAGNNNTQSVLEQLGQSHTSNVPPNAVSLPPFPGGRECSIEQEGSASDPHSHLLFGVNIDSSSLLMPNGMSNLRSIGIEGGDSTTLPFTSSNFNNDFSGNLAMTTPSSCIDESGFLQSSENLGSENPQSNTFVKVYKSGSFGRSLDISKFSSYHELRSELARMFGLEGQLEDPVRSGWQLVFVDRENDVLLLGDDPWPEFVSSVWCIKILSPQEVQQMGKRGLELLNSAPSSNNVDKLPSNGNCDDFGNRSDPRNLGNGIASVGGSFNY

SEQ ID NO: 4155 - protein, 430 aa, Arabidopsis thaliana
MCSVSELLDMENFQGDLTDVVRGIGGHVLSPETPPSNIWPLPLSHPTPSPSDLNINPFGDPFVSMDDPLLQELNSITNSGYFSTVGDNNNNIHNNNGFLVPKVFEEDHIKSQCSIFPRIRISHSNIIHDSSPCNSPAMSAHVVAAAAAASPRGIINVDTNSPRNCLLVDGTTFSSQIQISSPRNLGLKRRKSQAKKVVCIPAPAAMNSRSSGEVVPSDLWAWRKYGQKPIKGSPFPRGYYRCSSSKGCSARKQVERSRTDPNMLVITYTSEHNHPWPIQRNALAGSTRSSTSSSSNPNPSKPSTANVNSSSIGSQNTIYLPSSTTPPPTLSSSAIKDERGDDMELENVDDDDDNQIAPYRPELHDHQHQPDDFFADLEELEGDSLSMLLSHGCGGDGKDKTTASDGISNFFGWSGDNNYNNYDDQDSRSL

SEQ ID NO: 4156 - protein, 600 aa, Arabidopsis thaliana
MKYVLVTGGVVSGLGKGVTASSIGVLLKACGLRVTSIKIDPYLNTDAGTMSPFEHGEVFVLDDGGEVDLDLGNYERFLDIKLTRDNNITTGKIYQHVIAKERKGDYLGKTVQVVPHVTDAIQDWIERVAVIPVDGEEDPADVCVIELGGTIGDIESAPFIEALGQFSYRVGPGNFCLVHVSLVPVLNVVGEQKTKPTQHSVKGLRGLGLTPDILACRSTKPLEDNVKEKLAQFCHVPLEYIFTLYDVPNIWRIPLLLKDQKAHLAISKVLNLASILNEPSLGEWTSRAELCDNLHVPVRIAVVGKYTGLSDAYLSVLKALLHASVACRKKLVVDWVPACDLEKETEKENPDAYKAAWKLLKGVDGILVPGGFGDRGVEGKILAAKYARENKIPFLGICLGMQIAVIEFARSVLSLQDANSTEFNPETKHPCIIFMPEGSKTHMGGTMRLGSRKSIFNVKDSKSAKLYENKSFVDERHRHRYEVNPDMVERLEKAGLSFAAKDETGKRMEIIELPNHPFFIGAQFHPEFKSRPGKASPLFLGLIAASCGELDTVLNPASAHQHSISNGPTNIFINGTSKKSPNGLADVRYNNGYCNGLYTR

SEQ ID NO: 4157 - protein, 278 aa, Arabidopsis thaliana
MSTTSLQTIGAIKSYHHQAQHLVKNYLLADPFIPYTSVLTGIFLCKVVYDLCHFISNSHSKTYIILTKIQRIEWNNRGISTVHAIFISAMSLYFVFWSDLFSDRWHNDLVVFRSSRLSSLGLGISIGYFLADLGMIFWKYPSLGGIEYIVHHSLSGVAVAYSLFSGEGQLYTYMVLISEITTPEINLRWYLDTAGMKKSLAYVVNGVFIFLAWLVARILLFIYMFYHVYLHYNQVMRMHIFGYVLVFGVPAALGVMNLIWFGKIVRGVKKTLAKRCEC

SEQ ID NO: 4158 - protein, 301 aa, Arabidopsis thaliana
MADFGYFSDTDDSAVEELISQAKELSDLEQVAAINCSGFTDSTLPDDLESRFRRLKSLPAAPRHEPVSSSSSMNRQKPLSHSKSVNVNFSGNRRNPGKKTGSVSLSDEDSSNLSRKKRDLDLKSSSQAELVSNGSGDFSDSGNISESKILSPVKQQTKKKLPKEKRRIVSPSSSSSIDLATPPSTDSEPEKKSKPKSKSSWFDKLSPSKLIGSIWRSSPKKSTTNKKNLKNCKSFGAATYSSGRERNVDFDEFLSDLNAFPVEDQRKMLKKALKEQQKMRKEAAEIIKMAKHASARFDFDD

SEQ ID NO: 4159 - protein, 431 aa, Arabidopsis thaliana
MGWPWADHWTMVLNGLGQIFRPLSIKDQPLEPMKKMFQVDMTIGLWTAQLTLLTQVNVIVFFIEHIGEDTSPLYDRRKLQSFIPRMVQPRFVRPTQSSPSSISGEPNSSNLYVANCGPAVGLTHNAIAAVFAEFGEVNGVYAADDSGVRVIVSFADPFSAKAALEALSGRPCPDLKGRSLHIRYSVLQLPSETQVNDCVPVSLIDSELNIPGLFLLPDFVTVAEEQQLLAAVDARHWIGLAKRRVQHYGYEFCYGTRNVDTKKRLGELPSFVSPILERIYLFPNFDNGSASLNLDQLTVNEYPSGVGLSPHIDTHSAFEDCIFSLSLAGPCIMEFRRYSVSTWKASTTDAEKSGDSSCIKKALYLPPRSMLLLSGEARYAWNHYIPHHKIDKVKDKVIRRSSRRVSFTLRKVRNHPCSCKYPQYCDSQQQM

SEQ ID NO: 4160 - protein, 344 aa, Arabidopsis thaliana
MFSCIACTKADGGEEVEHGARGGTTPNTKEAVKSLTIQIKDMALKFSGAYKQCKPCTGSSSSPLKKGHRSFPDYDNASEGVPYPFMGGSAGSTPAWDFTNSSHHPAGRLESKFTSIYGNDRESISAQSCDVVLDDDGPKEWMAQVEPGVHITFASLPTGGNDLKRIRFSREMFDKWQAQRWWGENYDKIVELYNVQRFNRQALQTPARSDDQSQRDSTYSKMDSARESKDWTPRHNFRPPGSVPHHFYGGSSNYGPGSYHGGPPMDAARTTTSSRDDPPSMSNASEMQAEWIEEDEPGVYITIRQLSDGTRELRRVRFSRERFGEVHAKTWWEQNRERIQTQYL

SEQ ID NO: 4161 - protein, 505 aa, Arabidopsis thaliana
MAVVASAPGKVLMTGGYLVLEKPNAGLVLSTNARFYAIVKPINEEVKPESWAWKWTDVKLTSPQLSRESMYKLSLNHLTLQSVSASDSRNPFVEHAIQYAIAAAHLATEKDKESLHKLLLQGLDITILGSNDFYSYRNQIESAGLPLTPESLGTLAPFASITFNAAESNGANSKPEVAKTGLGSSAAMTTAVVAALLHYLGVVDLSDPCKEGKFGCSDLDVIHMIAQTSHCLAQGKVGSGFDVSCAVYGSQRYVRFSPEVLSFAQVAVTGLPLNEVIGTILKGKWDNKRTEFSLPPLMNLFLGEPGSGGSSTPSMVGAVKKWQMSDPEKARENWQNLSDANLELETKLNDLSKLAKDHWDVYLRVIKSCSVLTSEKWVLHATEPINEAIIKELLEAREAMLRIRILMRQMGEAASVPIEPESQTQLLDSTMSAEGVLLAGVPGAGGFDAIFAITLGDSGTKLTQAWSSHNVLALLVREDPHGVCLESGDPRTTCITSGVSSIHLE

SEQ ID NO: 4162 - protein, 589 aa, Arabidopsis thaliana
MEAKIVKVLDSSRCEDGFGKKRKRAASYAAYVTGVSCAKLQNVPPPNGQCQIPDKRRRLEGENKLSAYENRSGKALVRYYTYFKKTGIAKRVMMYENGEWNDLPEHVICAIQNELEEKSAAIEFKLCGHSFILDFLHMQRLDMETGAKTPLAWIDNAGKCFFPEIYESDERTNYCHHKCVEDPKQNAPHDIKLRLEIDVNGGETPRLNLEECSDESGDNMMDDVPLAQRSSNEHYDEATEDSCSRKLEAAVSKWDETDAIVVSGAKLTGSEVLDKDAVKKMFAVGTASLGHVPVLDVGRFSSEIAEARLALFQKQVEITKKHRGDANVRYAWLPAKREVLSAVMMQGLGVGGAFIRKSIYGVGIHLTAADCPYFSARYCDVDENGVRYMVLCRVIMGNMELLRGDKAQFFSGGEEYDNGVDDIESPKNYIVWNINMNTHIFPEFVVRFKLSNLPNAEGNLIAKRDNSGVTLEGPKDLPPQLESNQGARGSGSANSVGSSTTRPKSPWMPFPTLFAAISHKVAENDMLLINADYQQLRDKKMTRAEFVRKLRVIVGDDLLRSTITTLQNQPKSKEIPGSIRDHEEGAGGL

SEQ ID NO: 4163 - protein, 187 aa, Arabidopsis thaliana
MHTWKNQIFSDSQFVLLFMGKNCSIIFPEPHLFISHVFIIHLNVLFLVKKINKNNLRFVGSTSGQSQLVCSGCRNLLMYPVGATSVCCAVCNAVTAVPPPGTEMAQLVCGGCHTLLMYIRGATSVQCSCCHTVNLALEANQVAHVNCGNCMMLLMYQYGARSVKCAVCNFVTSVGGSTSTTDSKFNN

SEQ ID NO: 4164 - protein, 1919 aa, Arabidopsis thaliana
MAESNGKGSHNETSSDDDDEYEDNSRGFNLGFIFGNVDNSGDLDADYLDEDAKEHLSALADKLGSSLPDINLLAKSERTASDPAEQDYDRKAEDAVDYEDIDEEYDGPEVQVVSEEDHLLPKKEYFSTAVALGSLKSRASVFDDEDYDEEEEQEEEQAPVEKSLETEKREPVVLKEDKALEYEEEASILDKEDHMDTEDVQEEEVDELLEGTLDDKGATPLPTLYVEDGMVILQFSEIFAIHEPPQKRDRRENRYVTCRDKYKSMDISELVEDDEEVLLKSHGRIDTHVEQADLIQLDVPFPIREGLQLVKASTIGGITPESREFTKLGRDSCIMGELLKQDFIDDNSSLCQSQLSMQVFPLDQHEWERRIIWEHSPEISGNSGEIFEPGLEPEGMLVKGTNSETEQESLNVVNSRVQVQADNNMFVPFSANLLESFGSRGSQSTNESTNKSRHHPQLLRLESQWDENHLSGNDEAGVKKIKRLEKDALGRFSRLVLRERDLGDEAWLDSIIWDSEKELSRSKLIFDLQDEQMVFEIFDNEESKNLQLHAGAMIVSRSSKSKDETFQEGCESNSGWQFNLSNDKFYMNGKSSQQLQANTNKSSVHSLRVFHSVPAIKLQTMKSKLSNKDIANFHRPKALWYPHDNELAIKQQGKLPTRGSMKIIVKSLGGKGSKLHVGIEESVSSLRAKASRKLDFKETEAVKMFYKGKELDDEKSLAAQNVQPNSLVHLIRTKVHLWPWAQKLPGENKSLRPPGAFKKKSDLSTKDGHVFLMEYCEERPLMLSNAGMGANLCTYYQKSSPEDQRGNLLRNQSDTLGNVMILEPGDKSPFLGEIHAGCSQSSVETNMYKAPIFPQRLQSTDYLLVRSPKGKLSLRRIDKIVVVGQQEPRMEVMSPGSKNLQTYLVNRMLVYVYREFFKRGGGEHPIAADELSFLFSNLTDAIIKKNMKIIACWKRDKNGQSYWTKKDSLLEPPESELKKLVAPEHVCSYESMLAGLYRLKHLGITRFTLPASISNALAQLPDEAIALAAASHIERELQITPWNLSSNFVACTNQDRANIERLEITGVGDPSGRGLGFSYVRAAPKAPAAAGHMKKKAAAGRGAPTVTGTDADLRRLSMEAAREVLIKFNVPDEIIAKQTRWHRIAMIRKLSSEQAASGVKVDPTTIGKYARGQRMSFLQMQQQAREKCQEIWDRQLLSLSAFDGDENESENEANSDLDSFAGDLENLLDAEEGGEGEESNISKNDKLDGVKGLKMRRRPSQVETDEEIEDEATEYAELCRLLMQDEDQKKKKKKMKGVGEGMGSYPPPRPNIALQSGEPVRKANAMDKKPIAIQPDASFLVNESTIKDNRNVDSIIKTPKGKQVKENSNSLGQLKKVKILNENLKVFKEKKSARENFVCGACGQHGHMRTNKHCPRYRENTESQPEGIDMDKSAGKPSSSEPSGLPKLKPIKNSKAAPKSAMKTSVDEALKGDKLSSKTGGLPLKFRYGIPAGDLSDKPVSEAPGSSEQAVVSDIDTGIKSTSKISKLKISSKAKPKESKGESERRSHSLMPTFSRERGESESHKPSVSGQPLSSTERNQAASSRHTISIPRPSLSMDTDQAESRRPHLVIRPPTEREQPQKKLVIKRSKEMNDHDMSSLEESPRFESRKTKRMAELAGFQRQQSFRLSENSLERRPKEDRVWWEEEEISTGRHREVRARRDYDDMSVSEEPNEIAEIRRYEEVIRSEREEEERQKAKKKKKKKKLQPEIVEGYLEDYPPRKNDRRLSERGRNVRSRYVSDFERDGAEYAPQPKRRKKGEVGLANILERIVDTLRLKEEVSRLFLKPVSKKEAPDYLDIVENPMDLSTIRDKVRKIEYRNREQFRHDVWQIKYNAHLYNDGRNPGIPPLADQLLEICDYLLDDYEDQLKEAEKGIDPND

SEQ ID NO: 4165 - protein, 394 aa, Arabidopsis thaliana
MAETQGKVITCKAAVVWGPKVPLVIQEICVDPPQKMEVRVKILYSSICHTDLGCWNGTNEAERAFPRILGHEAVGIVESVGEGVKDVKEGDYVIPTFNGECGECKVCKREESNLCERYHVDPMKRVMVNDGGTRFSTTINKDGGSSQSQPIYHFLNTSTFTEYTVLDSACVVKIDPNSPLKQMSLLSCGVSTGVGAAWNIANVKEGKSTAVFGLGSVGLAVAEGARARGASRIIGVDANASKFEKGKLMGVTDFINPKDLTKPVHQMIREITGGGVDYSFECTGNVDVLREAFLSTHVGWGSTVLVGIYPTPRTLPLHPMELFDGRRITGSVFGGFKPKSQLPNFAQQCMKGVVKLEPFITNELPFEKINDAFQLLRDGKSLRCILQISKLLKR

SEQ ID NO: 4166 - protein, 557 aa, Arabidopsis thaliana
MADSSPDSCFKGGKFSAPGFRFHPTDEELVMYYLKRKICRKRLRVNVIGVVDVYKMDPEELPGQSMLKTGDRQWFYFTPRSRKYPNAARSNRGTENGYWKATGKDRVIEYNSRSVGLKKTLVFYRGRAPSGERTDWVMHEYTMDEDELGRCKNPQEYYALYKLFKKSGAGPKNGEQYGAPFQEEEWVDDDNEDVNAIAVAVPEQPVVRYEDARRVDERRLFNPVILQLEDIDELLNGIPNAPGVPQRCIPQVNSEEELQSTLVNNSAREFLPNGQQYNRPSSFDSLETAEVTSAPLVFEKEDFIEMDDLLLIPEFGASSTEKAAQFSNHGEFDDFNEFDQLFHDVSMSLDMEPIDQGTSANLSSLSDSANYTSDQKQQLLYQQFQDQTPENQLNNIMDPSTTLNQITSDIWFEDDQAILFDQQQSFSGAFASPSSGVMPDSTNPTMSVNAQGHEIQNGGGTTSQFSSALWALMDSIPSTPASACEGPLNRTFVRMSSFSRMRFNGKANGTPVSTTIAKKGIRNRGFLLLSIVGALCAIFWVLVATVRVSGRSLLLKD

SEQ ID NO: 4167 - protein, 316 aa, Arabidopsis thaliana
MLFSTAELNGESLNPITAIHIFPMTSTLISSNLSSSFFPTQNIHRIRIPTTSIPGSFNIRARRSKIVAKSLDLPLLPFSMSEVLVPTESKTLHLYEARYLALLEESMKRKKNMFVHFILDPISISETATEASFAARYGCLVLIENVERLDVGALVSIRGAGRVKISRFLGADPYLSGEVRPIQDRMNYESSNELTSKISQLKESIKNLNSLEIKLKAPADSPLQTRLINSLNWAEDEPPVDFDESFVPSLQERLSFSAFQPISGSTKSELSRLQQEKIKAMDMKDTIERLELSMGLIKENISSIAAKLAIQSLDIR

SEQ ID NO: 4168 - protein, 599 aa, Arabidopsis thaliana
MADHQEDEDLKLALKMSMQYNPPEPKRSKPIEEEETGSGSQSGGESPEAKSRRLQRELMAAAAEKRMVLFPKSPSPVNKARVLPISVVGGDKDEEVVGSCLGKELSVEESDQLFSIVFGNEVSKSVLAQWTNQGIRFSPDPETTIGLVQHEGGPCGVLAALQAFVLKYLLYFPGDRVASPCMGVWTLSKDRHVVSDSFSSVTEEAKTKALVRSMCEILFMCGDNNRAVIASFTNFEDSSSNQKDEAMAGGLPIESASDLQKILRFETFTTQASAQNKLEGTITAFQSRMGALLFLISALLSRGLDSVQADRDDPNLPLVTAPFGHASQEIVNLLLCGEAVPNVFDGRMDLGGGMFLKGISKNVDVGFLTLLESLNFCKVGQNLKCPKWPIWVIGSESHYTVLFALDPSVQEENELELRESQIRRAFDARDQSGGGGFITVEAFHQVAQETNIRLPIKKLDDICATGFIVWSELWQVILELDQNLGGIKDATGLMGKKVFDIYHFNGIAKSDINGGGQAMAVEGGMVPMQRPRLTKLNVSVPPKWTPEEYMTCALPPSSSEKDSEVNQPKPVQHAPLVDCIRTRWSRAACSWSGDPPSIV

SEQ ID NO: 4169 - protein, 379 aa, Arabidopsis thaliana
MAKEPVRVLVTGAAGNQEPILVKEESVVGIPTPLLKLKSWQWWVLVSVNIFFLIGGQAASVLLGRFYYDEGGNSKWMATLVQTAAFPILYIPLLLLPSSASVESSESSCSLKYIVLIYVLLGVIIAGDNMLYSVGLLYLSASTYSLICATQLAFNAVFSYFINAQKFTALILNSVVLLSFSAALIALNDDADTPSGVSRSKYIVGFVCTLAASALYSLLLSLMQFSFEKILKRETFSVVLEMQIYTSLVATCVSVIGLFASGEWRTLHGEMEGYHKGQASYVLTLVWTAVTWQVCSVGVVGLIFLVTSLFSNVISTLSLAVTPLAALVVFRDKMSGVKIMAMLIAIWGFASYVYQNHIDDLKVRQARQQAQAGRVEPPC

SEQ ID NO: 4170 - protein, 281 aa, Arabidopsis thaliana
MSLVRCLSLRSVLNPQRYRSSYSFLIHLQNPREEEEPTHKTRSYHSIIHQNSLIGASSTAFSRYRSVFQSPATISSDRFISTFNFSGSGDAVIDWLLQSVVSRSYELHNVADVLVSLNHLLALLNSFTFSQWWVFIIVASLLIRGITVPVMVDMLNNIAKFFKSLRSNQGEVLDKVSFLNKSRGVMYTMLEKEFFGVKGSVIGQGIQVPIFWFSMGELKQNMVEILMSRLRGKILSAELIKNGVLSRGRLVVVVGDGFGIEIQMFDLDFSLILRRRQVSQS

SEQ ID NO: 4171 - protein, 279 aa, Arabidopsis thaliana
MLNGKEEPKQKKGWSESLLEFRSGFGEKMKVVSKKRWKSLGPLHLKSKSVARFCFFSKLKSNNHGPGRAPVYLNVYDLTPINGYIYWAGLGIFHSGVEVHGVEYAFGAHDYATSGVFEVEPRQCPGFKFKKSIFIGTTNLNPTQVREFMEDMACSYYGNMYHLIVKNCNHFCQDVCYKLTGKKIPKWVNRLAQIGSVCSCILPESLKITAVCHDPDGQIPEEENEKRSLRSSFSCLSSISMRQKQLSTSSLFLQSPLRGCLPPWQLKRSKSNSSSLKER

SEQ ID NO: 4172 - protein, 89 aa, Arabidopsis thaliana
MKHIVKILSLLVAISAFWIGLLQAAIIPRSHTWLLPIYFVVSLGCYGLLMVGVGLMQFPTCPQEAVLLQKDIAEAKDFFKHKGVDVGSN

SEQ ID NO: 4173 - protein, 75 aa, Arabidopsis thaliana
MASWKKTIATPFKKAATFFNQPQQTNRHANAKAREEHEKRTVQELQGDVMACGYEDVLVMWSILDKSNSSNNLSS

SEQ ID NO: 4174 - protein, 400 aa, Arabidopsis thaliana
MDFVRGFWRKHRRKVLVTAGCLGSGYLLYKLYNSHTRRLADLERELAHERENDEIIKTQMKAHFESIQMIVDSTTLPHAMQFLSIRISEEIDVSHVMDRLNQGKGMLSPPEKLQLWDELKILSFTRMVLSLWSVTMLSLYIRVQVNILGRHLYVDTARALGSSHLLCTLLISSPTSYFSGKLTGCSVKNFSRLPFKATAACPEEVDLIDRDDEQKFLSSADFLVTNAMPSLISDMQGSAEEVLKGKQLKDVITTRVLQETVMQIVDVFMSTGSPHHWVDYLMMPQDTKLSRTTSDSSDEAVSKFHQLMVETREVLISTEFTNIVEISLKCFTDVLVEEMETQTEAGGLATGKPLAKVLPQIEKTMNVITAEPSKNRFLQIIRDLPEVKLFFTLLYANMPQ

SEQ ID NO: 4175 - protein, 156 aa, Arabidopsis thaliana
MDRSTPEHNSSPSHKRLSVSFLVSMMVLCARHANRLSKKLKLKSKKRTCSGGEGGGERFRWNMISSSMSSPRPKELFTTLSNKAMTMVRRKNPPEEKATAMEEEHGLWQREILMGGKCEPLDFSGVIYYDSNGRLLNEVPPRSPRGTPLPSYPTRS

SEQ ID NO: 4176 - protein, 326 aa, Arabidopsis thaliana
MTSHQNIKISEKIMISKYQEDVKQPRACELCLNKHAVWYCASDDAFLCHVCDESVHSANHVATKHERVCLRTNEISNDVRGGTTLTSVWHSGFRRKARTPRSRYEKKPQQKIDDERRREDPRVPEIGGEVMFFIPEANDDDMTSLVPEFEGFTEMGFFLSNHNGTEETTKQFNFEEEADTMEDLYYNGEEEDKTDGAEACPGQYLMSCKKDYDNVITVSEKTEEIEDCYENNARHRLNYENVIAAWDKQESPRDVKNNTSSFQLVPPGIEEKRVRSEREARVWRYRDKRKNRLFEKKIRYEVRKVNADKRPRMKGRFVRRSLAIDS

SEQ ID NO: 4177 - protein, 1153 aa, Arabidopsis thaliana
MAHKVKASFQSLKTMPADYRFLGSPISDHLETNLITPPNGHLKNGVNGTASSVGGMDSVNEDSPYSVRSILNGERSSIGDGDSILPLPESNDRKWSDTNVYARKKVLQFWVQLPNGNWELGKIMSTSGEESVIVVTEGKVLKVKSETLVPANPDILDGVDDLMQLSYLNEPAVLYNLEYRYNQDMIYTKAGPVLVAVNPFKEVPLYGNRNIEAYRKRSNESPHVYAIADTAIREMIRDEVNQSIIISGESGAGKTETAKIAMQYLAALGGGSGIEYEILKTNPILEAFGNAKTLRNDNSSRFGKLIEIHFSETGKISGAQIQTFLLEKSRVVQCTEGERSYHIFYQLCAGASPTLREKLNLTSAKQYNYLKQSNCYSINGVDDAERFHAVKEALDIVHVSKEDQENVFAMLAAVLWLGNVSFTIIDNENHVEPEPDESLSTVAKLIGCNINELKLALSKRNMRVNNDTIVQKLTLSQAIDARDALAKSIYACLFDWLVEQINKSLAVGKRRTGRSISILDIYGFESFNKNSFEQFCINYANERLQQHFNRHLFKLEQEEYIQDGIDWTRVDFEDNQECLSLFEKKPLGLLSLLDEESTFPNGTDLTLANKLKQHLNDNSCFRGDRGKAFTVAHYAGEVTYETTGFLEKNRDLLHSDSIQLLSSCSCHLPQAFASSMLIYSEKPLVGPLHKAGGADSQRLSVATKFKGQLFQLMQRLGNTTPHFIRCIKPNNVQSAGLYEQGLVLQQLRCCGVLEVVRISRSGFPTRMFHHKFARRYGFLLLENIAAKDPLSVSVAILHQFNILPEMYQVGYTKLFFRTGQIGVLEDTRNRTLHGILRLQSYFRGHQARCRLKELKTGITILQSFVRGEKMRKEYTELLQRHRASAAIQSHVKRRIASQQYKATVDASAVIQSAIRGELVRRCAGDIGWLSSGGTKRNESDEVLVKASYLSDLQRRVLRTEAALREKEEENDILRQRVQQYDNRWSEYETKMKSMEEIWQKQMKSLQSSLSIAKKSLEVEDSARNSDASVNASDATDLDSGGSHYQMGHGRSRSVGVGLSVISRLAEEFGQRAQVFGDDRKFLMEVKSGQVEANLNPDRELRRLKQMFETWKKDYGGRLRETKLILSKLGSEETGGSAEKVKMNWWGRLRSTRY

SEQ ID NO: 4178 - protein, 250 aa, Arabidopsis thaliana
MQLVPSDDDDDRKEQILFDESTSSNEIVAAERGDRVVEEGQVSEIAETDDDETTLLVSGDQPQCRICLDVGGEDLIAPCNCKGTQKHVHRSCLDNWRSTKEGFAFSHCTECRAFFKLRANVPADRWWLRLRFQLLVARDHAFIFISVQMIVAFLGLLVYKFYGEELREMFGYEEHPYGFYTLAVLAIVLVGLLYGFFIAIICGQKINERHYHVLAKQELTKEYIVEDRDCKNVPELDQSHVMELKMLGLY

SEQ ID NO: 4179 - protein, 498 aa, Arabidopsis thaliana
MGKVAVAFAAVAVVAACSVAAVMVGRRMKSRRKWRTVVEILKELEDDCDTPVGRLRQVVDAMAVEMHAGLASEGGSKLKMLLTFVDDLPTGREKGTYYALHLGGTYFRILRVLLGDQRSYLDVQDVERHPIPSHLMNSTSEVLFNFLAFSLERFIEKEENGSDSQGVRRELAFTFSFPVKHTSISSGVLIKWTKGFEISEMVGQDIAECLQGALNRRGLDMHVAALVNDTVGALSLGYYHDPDTVVAVVFGTGSNACYLERTDAIIKCQGLLTTSGSMVVNMEWGNFWSSHLPRTSYDIDLDAESSNANDMGFEKMISGMYLGDIVRRVILRMSEDSDIFGPISPVLSEPYVLRTNSVSAIHEDDTPELQEVARILKDIGVSDVPLKVRKLVVKICDVVTRRAGRLAAAGIAGILKKIGRDGSGGITSGRSRSEIQMQKRTVVAVEGGLYMNYTMFREYMEEALVEILGEEVSQYVVVKAMEDGSSIGSALLVASLQS

SEQ ID NO: 4180 - protein, 635 aa, Arabidopsis thaliana
MESNDDRNLEAINASVGRLVWVRRRNGSWWPGQTLVHDQVPDNSLVGPKVGTPIKLLGRDDVSVDWYILENSKTVKAFRCGEYDTCIEKAKASSSKKRSGKCTLREDAINNALKIENEHLAKEDDNLCNLSGEEDSKRCLSGKEDEDSGSSDAEETEDDELASAPEQLQSSISSQEMNNVGASKVQSKRRRTPNDSEDDGTEGVKRMRGLEDIGKEQAGGIVEHKQDLDLICAVGLSDSVSNGNTIANGNKVCSPSSLKRNVSECSKRKNRRRQLTKVLESTAMVSVPVTCDQGVSLDCQGIYDSKVSGMESVESMKSVSVVINNNSDSTGVSCEDAYENVVGASHNNKAKDSEISSISVSAEDDSSDRLFDVPLTGEENHSEGFPAACRISSPRKALVTDLTRRCGRNSHNVFVKNEASNGSACTSPPASEPVNCILSGIEKNTSKWQLKGKRNSRQMSKKQEERRNVYGEEANNNSSTPHSTLYEVKIEVKASYTKPRVPLVSRMSELSGKAIVGHPLSVEILEEDYSNGMVMPPVVAKAKSLPKKNGKKKKSRGFSWNSKKKSSSLSVKTRRLSTLTSQRLTERSKKQTTEKAKETVVACIPLKVVFSRINEVLKGSARQTQHRALPSAAKT

SEQ ID NO: 4181 - protein, 573 aa, Arabidopsis thaliana
MIITTHKRDINLLVLQLGAALAVSFAGFLFARFRKNTKRIGPTLPPLPPHSSDNGYRDYSNKSIDRRDEGTEKTDEETLIGVSPRRECDLDEKDVFLLPEFEEEAKKLDLLVCDDCETPRSDITAPLAFPSEEEADHENEINRLRNTVRALRERERCLEDKLLEYYSLKEQQKIAMELRSRLKLNQMETKVFNFKIKKLQAENEKLKAECFEHSKVLLELDMAKSQVQVLKKKLNINTQQHVAQILSLKQRVARLQEEEIKAVLPDLEADKMMQRLRDLESEINELTDTNTRLQFENFELSEKLESVQIIANSKLEEPEEIETLREDCNRLRSENEELKKDVEQLQGDRCTDLEQLVYLRWINACLRYELRTYQPPAGKTVARDLSTTLSPTSEEKAKQLILEYAHSEDNTDYDRWSSSQEESSMITDSMFLDDSSVDTLFATKTKKTGKKKLMHKLMKILHGKDTKDSKKRAGSSEPSSSNTGVHSTPRQLRSTHSMDFQMLMRGKDEEEDFKNHIVMLRRKSEAAGSSTYGEEHCLETDQNGKKELIKLADALTKSRSTKKLHKKSVSFFF

SEQ ID NO: 4182 - protein, 437 aa, Arabidopsis thaliana
MALKVEAKGGKVGIQWDDGSDYHDVTKIYVRGGLEGIQFIKFEYVKAGKKVIGPIHGASGRGFTETFEINNLEKEYLLSIEGYYNASTGVIQCLQFITNKKTYDPIGYNEGARFTLSASRSKIIGFHGFADKYLNSLGAYFIKIPSIQSAIEGAKTTGKGFDDGGDYDGIRKVYVTTDGSAIRHVRFDYDKAGQVETRERGAKTGTQHEFTVNHPYEYITSVEGTYAHTQPYNCVVLTSLTFKTSKGRASPAIGKVTGSKFKLERQGDAIVGFHGRVGSCIDGIGVYYAPLPPSPPPPEKLQGQGGDGGDSWDDGAFKNVKKIYVGQGDVGIAAVKFEYETYTSEVILAERHGKETLLGYEDEYITAVEGCHDKVIGSETGVITMLRFKTNKRNSPPFGLESAFSFILEKDGHKIVGFHGKASTLLHQIGVHVTAIA

SEQ ID NO: 4183 - protein, 837 aa, Arabidopsis thaliana
MAMSCKDGKLGCLDNGKYVRYTPEQVEALERLYHDCPKPSSIRRQQLIRECPILSNIEPKQIKVWFQNRRCREKQRKEASRLQAVNRKLTAMNKLLMEENDRLQKQVSQLVHENSYFRQHTPNPSLPAKDTSCESVVTSGQHQLASQNPQRDASPAGLLSIAEETLAEFLSKATGTAVEWVQMPGMKPGPDSIGIIAISHGCTGVAARACGLVGLEPTRVAEIVKDRPSWFRECRAVEVMNVLPTANGGTVELLYMQLYAPTTLAPPRDFWLLRYTSVLEDGSLVVCERSLKSTQNGPSMPLVQNFVRAEMLSSGYLIRPCDGGGSIIHIVDHMDLEACSVPEVLRPLYESPKVLAQKTTMAALRQLKQIAQEVTQTNSSVNGWGRRPAALRALSQRLSRGFNEAVNGFTDEGWSVIGDSMDDVTITVNSSPDKLMGLNLTFANGFAPVSNVVLCAKASMLLQNVPPAILLRFLREHRSEWADNNIDAYLAAAVKVGPCSARVGGFGGQVILPLAHTIEHEEFMEVIKLEGLGHSPEDAIVPRDIFLLQLCSGMDENAVGTCAELIFAPIDASFADDAPLLPSGFRIIPLDSAKQEVSSPNRTLDLASALEIGSAGTKASTDQSGNSTCARSVMTIAFEFGIESHMQEHVASMARQYVRGIISSVQRVALALSPSHISSQVGLRTPLGTPEAQTLARWICQSYRGYMGVELLKSNSDGNESILKNLWHHTDAIICCSMKALPVFTFANQAGLDMLETTLVALQDISLEKIFDDNGRKTLCSEFPQIMQQGFACLQGGICLSSMGRPVSYERAVAWKVLNEEENAHCICFVFINWSFV

SEQ ID NO: 4184 - protein, 269 aa, Arabidopsis thaliana
MAGWQKNLQIVIRQVGKRVKDSHISTANYSSTRNLESPFSQGYLQSLLRSTYSSRPLYYHLQQLGISTSRQLQAGEEPVSSPLSSPALLGSGKEEEQKIIPKRQKVQAVLKSIKQSPKKVNLVAALVRGMRVEDALMQLQVTVKRASQTVYRVIHAARANATHNHGLDPDRLLVAEAFVGKGLFGKKVAYHAKGRSGIISIPRCRLTVIVRETTAEEEAEIARLKVHNFKKLNKRQRQLVPHKLIETSPIWNRRGTKGNHRSSELVPSH

SEQ ID NO: 4185 - protein, 439 aa, Arabidopsis thaliana
MIGSPVKPLFVFVLTFSLLLVVILLSPSPHILQIPFPSGSSVGSSDIWSVKRIMEWRPCKWWLQGHLTPLPAKTNGYIRVDCYGGLNQMRRDLCDGVGIARLLNATLVLPKFEVAAYWNESSGFADVFDVDYFIQKMSGYIEVVKELPKDIASKEPFKVDCSKRKGQFDYIESVLPLLLEHHYISFTPAMSQRRDRYPEYARATLCQACYSAIHLTSSLEKKAVELFDAIPKPFLSLHLRFEPDMVAYSQCEYPNLSPSSIAAIEAARADRKPWTGELAQTWRKRGKCPLTPNETVLMLQSLNIPTSTNIYLAAGDGLMEMEGFTSVYTNVFTKSVLLNQEDFTRMHGNTKAALDYHVSINSDAYVATYFGNMDKIVAAMRTYKQMHNTLFLSRKAFAELTSQGLEGAELKKALWEVHKSDFAIGRGFALPDCFCEFEL

SEQ ID NO: 4186 - protein, 150 aa, Arabidopsis thaliana
MTTAISMNPSLFRVICILHSIIALTSGTLMMFYTEKASIFGPGSEIASKLKGSTPHDELLIQISQSFSGLLLFAIGLVLFMVSFVKDKEFHSFFAGGSVILYVLMAMWRVLFEWKIEDLAYEWPKQALGDIALAISWVFFLVYSWREKYD

SEQ ID NO: 4187 - protein, 439 aa, Arabidopsis thaliana
MSASILLCDGFDVRRILTGKLNGDESSTVTTEEDDEAVFSGEEWCGESSYCFYFVKQFAYDDPEIKAKIDEADHEVYHCNTDRIHIANRLKSKRAARLSLVASMETLMSMKINEVEKEQEVVRGRIYRLGERLSEIKMEIELLDVQMACVLNQRDKAVERIKFLRMQRDKGNAAFYQSRVVMKKAIELAASGNVRDLEELADSEVEKFMSRWNNDKAFRDNYKKRILPSVNERKLRCDVQIRDLEGNLDTENGNETVVKKAIEYKRFSTEEESDDFDIPVYEKLGKEEKEIDEETLKEKKREEQLEKARLAMERKRKLHEKAAAKAVIRVKKEAEKKRKELDKRAKKKKAVCKSSSVDVDRTTETVSEASKPEKEKLLNGRSVFPKQRSYNYRYHGKGNDAVLKAIIKRRKAYRLWVWTVSSAAVALPLALLVVFYYVR

SEQ ID NO: 4188 - protein, 613 aa, Arabidopsis thaliana
MVETEEKTDKLEKIKVETEEKTDKLEKIKAKRRRVSSSEIDSDTQKYKRIQRCRAKPSYLLCIGPKSSRSEYLNRLPGLLRELLRNRHWNDASRVLSVLMKGTINDPCPKMNRLKYEAHIQIVSHSETNKNKADEIGRIYDTWIGQIGKQHKEERLLVWYEQICHFIEHEMNNEAYSTVISLMQNRDFAMLPRANLFIGISFYKMWCNKFLKELQPEDADDNGSVSNISESGSGSLVECSGRDESVCSLASEVSARKDSETSVMKNKKVSHLSISDSETRMDTKVKVMSTPYVTPPPQLYAISEENEASLGDGIVEFDPTVINILGDMDPWLLPFKPPEDPDCYRKIVNDSYYKEAVKYMRQTLQSPPHVSLAALHPLVQILLIGGHVDEAMKVVEEMCNKIHDVKPFRIKALMMEKFHRNSDMLAKCYEDILKIDPCCITTLKKLIGMCLEDEYSRESLTEMIALHVEASFPEPEIWKELASCFSNFFENLDEDRLSVCLDGSEDKRNPQTYSVRYNPTPKTFTKTSWTLRAKWWLNRHFSPQMLETEIKNVTLTGDWEMMTYKAACASYIYGREFGYVTKVYELLKSSNKREFFKFLREHRVNGNKMYNFE

SEQ ID NO: 4189 - protein, 699 aa, Arabidopsis thaliana
MPKSVKPISESDKLSDHLRDSSLTSEINKPDFRELDLGSPVSPLRSQPRGLTTTTTTTTTSSSSSSSSGSVTGRIKHAPVIGRSNSVRSQSNSSSGNNNLRPRSDSATTSSSSHSQPLLSSSSSSATSPAPTSPANVLPTGNICPSGKIQITGMTQSRSRSDVLGSGTGTYGHGSIMRGGGISPAKPTNTGGGSNSPVNVGSSSRSSSTVATGETPIWKKAILGSDSEEVKRVGNEMYRKGLFNEALKLYDRAIALSPTNAAYRSNRAAALIGLSRIGEAVKECEDAVRSDPNYGRAHHRLALLLIRLGQVNSARKHLCFLGRPSDPMELQKLEAVEKHLIKCVDARRVTDWKTVLIEADAAIVSGADFSPQLFMCKVEAFLKLHRLDDAQSKLLEVPKVEPFPVSCSQTRFSGMACEAYIYFVKAQIEMALGRFENAVMAAEKASQIDPRCNEVAMLHNTVTLVARARARGNDLYKSERYTEASSAYAEGLRLDPCNAILYCNRAACWFKLGMWERSIEDCNQALRYQPSYTKPLLRRAASNSKMERWGAAVSDYEALIRELPHDKEVAESLFHAQVALKKSRGEEVLNMEFGGEVEEIYSLEQFKSAMNLPGVSVIHFSTASDHQCKQISPFVDSLCTRYPSIHFLKVDIDKCPSIGNAENVRVVPTVKIYKNGSRVKEIVCPSKEVLEYSVRHYSG

SEQ ID NO: 4190 - protein, 1038 aa, Arabidopsis thaliana
MGFIFSTEKVVYVLLLIFVCLENFGSNAQLLPEDEVQTLRTIFRKLQNQTVNIERTSCSDQNWNFVVESASNSPTSNITCDCTFNASSVCRVTNIQLKSFSLPGIFPPEFGNLTRLREIDLSRNFLNGTIPTTLSQIPLEILSVIGNRLSGPFPPQLGDITTLTDVNLETNLFTGPLPRNLGNLRSLKELLLSANNFTGQIPESLSNLKNLTEFRIDGNSLSGKIPDFIGNWTLLERLDLQGTSMEGPIPPSISNLTNLTELRITDLRGQAAFSFPDLRNLMKMKRLVLRNCLIRGPIPEYIGSMSELKTLDLSSNMLTGVIPDTFRNLDAFNFMFLNNNSLTGPVPQFIINSKENLDLSDNNFTQPPTLSCNQLDVNLISSYPSVTDNSVQWCLREGLPCPEDAKQSSLFINCGGSRLKIGKDTYTDDLNSRGQSTFSSVSERWGYSSSGVWLGKEDAGYLATDRFNLINGSTPEYYKTARLSPQSLKYYGLCLRRGSYKLQLHFAEIMFSNDQTFNSLGRRIFDIYVQGNLLERDFNIAERAGGVGKPFIRQIDGVQVNGSTLEIHLQWTGKGTNVIPTRGVYGPLISAITITPNFKVDTGKPLSNGAVAGIVIAACAVFGLLVLVILRLTGYLGGKEVDENEELRGLDLQTGSFTLKQIKRATNNFDPENKIGEGGFGPVYKGVLADGMTIAVKQLSSKSKQGNREFVTEIGMISALQHPNLVKLYGCCIEGKELLLVYEYLENNSLARALFGTEKQRLHLDWSTRNKICIGIAKGLAYLHEESRLKIVHRDIKATNVLLDLSLNAKISDFGLAKLNDDENTHISTRIAGTIGYMAPEYAMRGYLTDKADVYSFGVVCLEIVSGKSNTNYRPKEEFVYLLDWAYVLQEQGSLLELVDPDLGTSFSKKEAMRMLNIALLCTNPSPTLRPPMSSVVSMLEGKIKVQPPLVKREADPSGSAAMRFKALELLSQDSESQVSTYARNREQDISSSSMDGPWVDSSFSEPGKDVSLQQQEEGRSSSSSRKLLDDLTDVKIE

SEQ ID NO: 4191 - protein, 304 aa, Arabidopsis thaliana
MRCNACWRDLEGRAISTTCGHLLCTEDASKILSNDGACPICDQVLSKSLMKPVDINPNEEWINMAMAGISPQILMKSAYRSVMFYIAQRDLEMQYKMNRVVAQCRQKCEGMQAKFSEKMEQVHTAYQKMGKRCQMMEQEVENLTKDKQELQEKFSEKSRQKRKLDEMYDQLRSEYESVKRTAIQPANNFYPRHQEPDFFSNPAVNMMENRETIRKDRSFFSPATPGPKDEIWPARQNSSNSGPFDISTDSPAIPSDLGNRRAGRGHPVYGGGGTANPQSTLRNLILSPIKRSQLSRSRPQLFTL

SEQ ID NO: 4192 - protein, 314 aa, Arabidopsis thaliana
MAAITEMATDSNDVINDGGTGDGIEKSTDSKPEIESDDLKPKSKPEYDQMKKLVAMFKKLNPEAKEFFPSYKRNTNQSDDFVIAIKPSGEDNKKVAINRRRRNNYNQGRRVRLPGRASKAQREDSIRRTVYVSDIDQSVTEEGLAGLFSSCGQVVDCRICGDPNSVLRFAFVEFSDDQGARSALSLGGTMIGYYPVRVLPSKTAILPVNPTFLPRSEDEREMCSRTIYCTNVDKNATEDDVNTFFQSACGEVTRLRLLGDQVHSTRIAFVEFAMAESAVAALNCSGIVLGSQPIRVSPSKTPVRSRITRSPSPN

SEQ ID NO: 4193 - protein, 620 aa, Arabidopsis thaliana
MSVFSDEIHAELKHSNTGTVAMASFGENLNASQFYITLCDDLDCLDGKYTVFGKITSGFETLTCIAKASVDAKNRPNKDIRIRHTYILTDPFDDPPQLAKMIPDASPKGKPKVEVTDDMQPREDWDIRDAEFDFLELNEAFAEMAANPVEVAINSMIIRDIMEDPENEGPHNMRSDFEPLLSVLRLRDYETGDIIEFDSTEASEEALSDITEFGSTEASEAHFEQEPYSARIKKVEKEINELAEKICNLGIKESDTGLAPPNQWDLVSDKQMMQEEQPLLVATCTQIISPNTEDAKYVVDIKKIGKYVVGLGDKASPTDIEAGMRVGVDQKKYQIQIPLPPKIDPSVTMMTVEEKPDATYSDIGGCKEQIEKIREVVELPMLHPEKFVRLGIDPPKGVLCYGPPGSGKTLVARAVANRTGACFIRVVGSELVQKYIGEGARMVRELFQMARSKKACILFFDEIDAIGGARFDDGVGSDNEVQRTMLEILYQLDGFDARGNIKVLMATNRPDILDPALLRPGRLDRKVEFCLPDLEGRTQIFKIHTRTMSCERDIRFELLAGLCPNSTGADIRSVCIEAGMYAIGARRKSVTEKDFLDAVNKVVKGYQKFSATPKYMAYYI

SEQ ID NO: 4194 - protein, 370 aa, Arabidopsis thaliana
MLTCIACTKQLNTNNGGSTREEDEEHGVIGTPRTKQAIKSLTSQLKDMAVKASGAYKNCKPCSGTTNRNQNRNYADSDAASDSGRFHYSYQRAGTATSTPKIWGNEMESRLKGISSEEGTPTSMSGRTESIVFMEDDEVKEWVAQVEPGVLITFVSLPQGGNDLKRIRFRSTRFPYYRDQLLLWCRQGWVFWPQNCREMFNKWQAQKWWVENFEKVMELYNVQFNQQSVPLQTPPVSEDGGSQIQSVKDSPVTPPLERERPHRNIPGSSGFASTPKLSSISGTKTETSSIDGSARSSSVDRSEEVSVSNASDMESEWVEQDEPGIYITIRALPDGNRELRRVRFSRDKFGETHARLWWEQNRARIQQQYL

SEQ ID NO: 4195 - protein, 527 aa, Arabidopsis thaliana
MVTKESIEVIAQSIGLSTLSPDVSAALAPDVEYRVREVMQVYHQLQLYFCPLISSLTCRRNLQEAIKCMRHARRTTLMAHDVDSALHFRNLEPTSGSKSMRFKRAPENRDLYFFDDKDVELKNVIEAPLPNAPPDASVFLHWLAIDGIQPSIPQNSPLQAISDLKRSEYKDDGLAARQVLSKDLQIYFDKVTEWALTQSGSTLFRQALASLEIDPGLHPLVPFFTSFIAEEIVKNMDNYPILLALMRLARSLLHNPHVHIEPYLHQLMPSIITCLIAKRLGRRSSDNHWDLRNFTASTVASTCKRFGHVYHNLLPRVTRSLLHTFLDPTKALPQHYGAIQGMVALGLNMVRFLVLPNLGPYLLLLLPEMGLEKQKEEAKRHGAWLVYGALMVAAGRCLYERLKTSETLLSPPTSSVWKTNGKLTSPRQSKRKASSDNLTHQPPLKKIAVGGIIQMSSTQMQMRGTTTVPQQSHTDADARHHNSPSTIAPKTSAAAGTDVDNYLFPLFEYFGESMLMFTPTHELSFFL

SEQ ID NO: 4196 - protein, 328 aa, Arabidopsis thaliana
MAIARTGVYVDDYLEYASTFPAELQRLLNTVRELDERSQSLINQTRQQTKYCLGLASQSSKKGNGNHYNNGGLDEEETIEKMRKEIESSQENALSLCTEKVLLARQAYDLIDSHVKRLDEDLNNFAEDLKQEGKIPPDEPSVLPPLPIVPKAEKRKSFYGTPQPKKIDYRDRDWDRDRDFELMPPPGSNRKDLMPIEEQPIDPNEPTYCVCHQVSFGDMIACDNENVSLLSQHLIIYFLMYSCYDETFCSCFDSAKEVNGFTIHALASHLRPDSKGNGTAPPADSSHSHTNIICTCEKVPLASSLAPSLHDQCHQTHLSCYPTSSKCK

SEQ ID NO: 4197 - protein, 98 aa, Arabidopsis thaliana
MAGLINKIGDALHIGGGNKEGEHKKEEEHKKHVDEHKSGEHKEGIVDKIKDKIHGGEGKSHDGEGKSHDGEKKKKKDKKEKKHHDDGHHSSSSDSDSD

SEQ ID NO: 4198 - protein, 594 aa, Arabidopsis thaliana
MAKLNRSNIGLSLLLSMFLANFITDLEASSHQDLNQPYRTGYHFQPLKNWMNDPNGPMIYKGIYHLFYQYNPYGAVWDVRIVWGHSTSVDLVNWISQPPAFNPSQPSDINGCWSGSVTILPNGKPVILYTGIDQNKGQVQNVAVPVNISDPYLREWSKPPQNPLMTTNAVNGINPDRFRDPTTAWLGRDGEWRVIVGSSTDDRRGLAILYKSRDFFNWTQSMKPLHYEDLTGMWECPDFFPVSITGSDGVETSSVGENGIKHVLKVSLIETLHDYYTIGSYDREKDVYVPDLGFVQNESAPRLDYGKYYASKTFYDDVKKRRILWGWVNESSPAKDDIEKGWSGLQSFPRKIWLDESGKELLQWPIEEIETLRGQQVNWQKKVLKAGSTLQVHGVTAAQADVEVSFKVKELEKADVIEPSWTDPQKICSQGDLSVMSGLGPFGLMVLASNDMEEYTSVYFRIFKSNDDTNKKTKYVVLMCSDQSRSSLNDENDKSTFGAFVAIDPSHQTISLRTLIDHSIVESYGGGGRTCITSRVYPKLAIGENANLFVFNKGTQSVDILTLSAWSLKSAQINGDLMSPFIEREESRSPNHQF

SEQ ID NO: 4199 - protein, 2179 aa, Arabidopsis thaliana
MEGDERGVLLACVISGTLFTVFGSGSFWILWAVNWRPWRLYSWIFARKWPKVLQGPQLDILCGVLSLFAWIVVVSPIAILIGWGSWLIVILDRHIIGLAIIMAGTALLLAFYSIMLWWRTQWQSSRAVALLLLLGVALLCAYELCAVYVTAGAHASQQYSPSGFFFGVSAIALAINMLFICRMVFNGNGLDVDEYVRRAYKFAYSDCIEVGPVACLPEPPDPNELYPRQTSRASHLGLLYLGSLVVLLAYSVLYGLTARESRWLGGITSAAVIVLDWNIGACLYGFKLLQNRVLALFVAGISRLFLICFGIHYWYLGHCISYIFVASVLSGAAVSRHLSITDPSAARRDALQSTVIRLREGFRRKEQNSSSSSSDGCGSSIKRSSSIDAGHTGCTNEANRTAESCTADNLTRTGSSQEGINSDKSEESGRPSLGLRSSSCRSVVQEPEAGTSYFMDKVSDQNNTLVVCSSSGLDSQGYESSTSNSANQQLLDMNLALAFQDQLNNPRIASILKKKAKEGDLELTNLLQDKGLDPNFAVMLKEKNLDPTILALLQRSSLDADRDHRDNTDITIIDSNSVDNTLPNQISLSEELRLRGLEKWLKLSRLLLHHVAGTPERAWGLFSLVFILETIIVAIFRPKTITIINSSHQQFEFGFSVLLLSPVVCSIMAFLRSLQVEEMALTSKSRKYGFVAWLLSTSVGLSLSFLSKSSVLLGISLTVPLMAACLSIAVPIWMHNGYQFWVPQLSCGDQARDLRSPRIKGFILWICVVLFAGSVISLGAIISAKPLDDLKYKLFSARENNVTSPYTSSVYLGWAMSSGIALVVTAILPIVSWFATYRFSHSSAVCLMIFSVVLVAFCGTSYLEVVKSRDDQLPTKGDFLAALLPLACIPALLSLCCGMVKWKDDCWILSRGVYVFFSIGLLLLFGAIAAVIAVKPWTIGVSFLLVLFLMVVTIGVIHLWASNNFYLTRKQTSFVCFLALLLGLAAFLLGWHQDKAFAGASVGYFTFLSLLAGRALAVLLSPPIVVYSPRVLPVYVYDAHADCGKNVSAAFLVLYGIALATEGWGVVASLIIYPPFAGAAVSAITLVVAFGFAVSRPCLTLEMMEVAVRFLSKDTIVQAISRSATKTRNALSGTYSAPQRSASSAALLVGDPSAMRDKAGNFVLPRDDVMKLRDRLRNEERVAGSIFYKMQCRKGFRHEPPTNVDYRRDMCAHARVLALEEAIDTEWVYMWDKFGGYLLLLLGLTAKAERVQDEVRLRLFLDSIGFSDLSARKISKWKPEDRRQFEIIQESYLREKEMEEESLMQRREEEGRGKERRKALLEKEERKWKEIEASLIPSIPNAGSREAAAMAAAIRAVGGDSVLEDSFARERVSGIARRIRTAQLERRAQQVKTYFYILQVFFLMMLINGELTKKSYYQTGISGAVCVLDDEPMISGKHCGQMDSSVCQSQKISFSVTAMIQSDSGPVCLFGTEFQKKVCWEILVAGSEQGIEAGQVGLRLITKGERQTTVAREWYIGATSITDGRWHTVTITIDADAGEATCYIDGGFDGYQNGLPLSIGSAIWEQGAEVWLGVRPPIDVDAFGRSDSDGVESKMHIMDVFLWGKCLSEEEAASLHAAIGMADLDMIDLSDDNWQWTDSPPRVDGWDSDPADVDLYDRDDVDWDGQYSSGRKRRSGRDFVMSVDSFARRHRKPRMETQEDINQRMRSVELAVKEALSARGDKQFTDQEFPPNDRSLFVDTQNPPSKLQVVSEWMRPDSIVKENGSDSRPCLFSGDANPSDVCQGRLGDCWFLSAVAVLTEVSRISEVIITPEYNEEGIYTVRFCIQGEWVPVVIDDWIPCESPGKPAFATSRKLNELWVSMVEKAYAKLHGSYEALEGGLVQDALVDLTGGAGEEIDLRSAQAQIDLASGRLWSQLLRFKQEGFLLGAGSPSGSDVHVSSSGIVQGHAYSVLQVREVDGHRLVQIRNPWANEVEWNGPWSDSSPEWTDRMKHKLKHVPQSKEGIFWMSWQDFQIHFRSIYVCRVYPREMRYSVNGQWRGYSAGGCQDYSSWHQNPQFRLRATGSDASLPIHVFITLTQGVGFSRTTPGFRNYQSSHDSQLFYIGLRILKTRGRRAAYNIFLHESVGGTDYVNSREISCEMVLDPDPKGYTIVPTTIHPGEEAPFVLSVFTKASIVLEAL

SEQ ID NO: 4200 - protein, 599 aa, Arabidopsis thaliana
MSTVAPPADQAADVLKKLSLDSKSRTLEIPEPTKKTGVYQYGAMDSNGQVPSFDRSLSPMLPSDALDPSVFYVPNVYQQPYYYGYGSDYTGYTNSESVDMTSGAYGENASLVYPQGYGYAAFPYSPATSPAPQLGGDGQLYGAQQYQYPFPLTASSGPFASSVPASTQSKLSTNKAANSASAGIPKGMNGSAPVKPLNQSALYGNSALGGGLAAGYQDPRYSYDGFYTPVSWHDGSNFSDVQRSVSGSGVASSYSKANNNVPATRNQNSSSNSHYTSMYQPASMTGYAAQGYYDRVSPNKSYGQYGSTVRSGMGYGSSGYGSRTNERGWLNTDNKYRSRGRGNSYFYGNENIDGLNELNRGPRAKGTKATEEVSSEEVKKQTFDESNTEETVTCVLPDREECNRDDFPVEYKDAKFFIIKSYSEDDVHKSIKYNVWASTPNGNKKLDAAYQEAQQKSSGCPVFLFFSVNASGQFIGLAEMKGPVDFNKNIEYWQQDKWTGSFPLKWHILKDVPNSLLKHITLEYNENKPVTNSRDTQEVKLEQGLKVVKIFKEHNSKTCILDDFSFYEARQKTILEKKAKQQQSQKQAREENGLGRKNQ

SEQ ID NO: 4201 - protein, 445 aa, Arabidopsis thaliana
MLTSFKSSSSSSEDATATTTENPPPLCIASSSAATSASHHLRRLLFTAANFVSQSNFTAAQNLLSILSLNSSPHGDSTERLVHLFTKALSVRINRQQQDQTAETVATWTTNEMTMSNSTVFTSSVCKEQFLFRTKNNNSDFESCYYLWLNQLTPFIRFGHLTANQAILDATETNDNGALHILDLDISQGLQWPPLMQALAERSSNPSSPPPSLRITGCGRDVTGLNRTGDRLTRFADSLGLQFQFHTLVIVEEDLAGLLLQIRLLALSAVQGETIAVNCVHFLHKIFNDDGDMIGHFLSAIKSLNSRIVTMAEREANHGDHSFLNRFSEAVDHYMAIFDSLEATLPPNSRERLTLEQRWFGKEILDVVAAEETERKQRHRRFEIWEEMMKRFGFVNVPIGSFALSQAKLLLRLHYPSEGYNLQFLNNSLFLGWQNRPLFSVSSWK

SEQ ID NO: 4202 - protein, 1166 aa, Arabidopsis thaliana
MKQRWLLVLILCFFTTSLVMGIHGKHLINDDFNETALLLAFKQNSVKSDPNNVLGNWKYESGRGSCSWRGVSCSDDGRIVGLDLRNSGLTGTLNLVNLTALPNLQNLYLQGNYFSSGGDSSGSDCYLQVLDLSSNSISDYSMVDYVFSKCSNLVSVNISNNKLVGKLGFAPSSLQSLTTVDLSYNILSDKIPESFISDFPASLKYLDLTHNNLSGDFSDLSFGICGNLTFFSLSQNNLSGDKFPITLPNCKFLETLNISRNNLAGKIPNGEYWGSFQNLKQLSLAHNRLSGEIPPELSLLCKTLVILDLSGNTFSGELPSQFTACVWLQNLNLGNNYLSGDFLNTVVSKITGITYLYVAYNNISGSVPISLTNCSNLRVLDLSSNGFTGNVPSGFCSLQSSPVLEKILIANNYLSGTVPMELGKCKSLKTIDLSFNELTGPIPKEIWMLPNLSDLVMWANNLTGTIPEGVCVKGGNLETLILNNNLLTGSIPESISRCTNMIWISLSSNRLTGKIPSGIGNLSKLAILQLGNNSLSGNVPRQLGNCKSLIWLDLNSNNLTGDLPGELASQAGLVMPGSVSGKQFAFVRNEGGTDCRGAGGLVEFEGIRAERLERLPMVHSCPATRIYSGMTMYTFSANGSMIYFDISYNAVSGFIPPGYGNMGYLQVLNLGHNRITGTIPDSFGGLKAIGVLDLSHNNLQGYLPGSLGSLSFLSDLDVSNNNLTGPIPFGGQLTTFPVSRYANNSGLCGVPLRPCGSAPRRPITSRIHAKKQTVATAVIAGIAFSFMCFVMLVMALYRVRKVQKKEQKREKYIESLPTSGSCSWKLSSVPEPLSINVATFEKPLRKLTFAHLLEATNGFSAETMVGSGGFGEVYKAQLRDGSVVAIKKLIRITGQGDREFMAEMETIGKIKHRNLVPLLGYCKVGEERLLVYEYMKWGSLETVLHEKSSKKGGIYLNWAARKKIAIGAARGLAFLHHSCIPHIIHRDMKSSNVLLDEDFEARVSDFGMARLVSALDTHLSVSTLAGTPGYVPPEYYQSFRCTAKGDVYSYGVILLELLSGKKPIDPGEFGEDNNLVGWAKQLYREKRGAEILDPELVTDKSGDVELFHYLKIASQCLDDRPFKRPTMIQLMAMFKEMKADTEEDESLDEFSLKETPLVEESRDKEP

SEQ ID NO: 4203 - protein, 477 aa, Arabidopsis thaliana
MNSVIHYSTSVAVRKASRFLFTSRKFCNGSIGGDVTDNGTEEPLKITWESSEMDCEFDQEENGEKISVRKRFMESTKLSASRVLDTLQQDCPGFNTKSALDELNVSISGLLVREVLVGILRTLSFDNKTRCAKLAYKFFVWCGGQENFRHTANCYHLLMKIFAECGEYKAMCRLIDEMIKDGYPTTACTFNLLICTCGEAGLARDVVEQFIKSKTFNYRPYKHSYNAILHSLLGVKQYKLIDWVYEQMLEDGFTPDVLTYNIVMFANFRLGKTDRLYRLLDEMVKDGFSPDLYTYNILLHHLATGNKPLAALNLLNHMREVGVEPGVIHFTTLIDGLSRAGKLEACKYFMDETVKVGCTPDVVCYTVMITGYISGGELEKAEEMFKEMTEKGQLPNVFTYNSMIRGFCMAGKFKEACALLKEMESRGCNPNFVVYSTLVNNLKNAGKVLEAHEVVKDMVEKGHYVHLISKLKKYRRS

SEQ ID NO: 4204 - protein, 108 aa, Arabidopsis thaliana
MLLLLSLQLQELIHSFSMNYGLLLALINFCKICAAVFLEFGNQLSFGRSFLCKFDDDVCWDSLIKNRWTSVFKVLAVSGGFGVFRLLLNRSAMNGDEESSIHVFNFIC

SEQ ID NO: 4205 - protein, 445 aa, Arabidopsis thaliana
MSNYQGDDAEYMEDVDDEMDEDDLDEDFRGDDMAASDSDVDEFDYSNNKIADTSADQARKGKDIQGIPWDRLSITRETYRQTRLEQYKNYENVPNSGESSGKDCMATQKGALFYDFWRNTRSIKSSILHFQLRNLVWATSKHDVYLMSQYLVSHYSTLTSGKHDVLNVQGHVSPSEKHPGSLLEGFTKTQVSTLAVRDKFLVAGGFQGELICKHLDRPGVSFCSRTTYDDNAITNAIEIYNKPSGALHFTASNNDCGVRDFDMERYQLVNQFRFPWPVNHTSLSPDGKLLTIVGDNPESLLVDPNTGKTLATLSGHLDFSFASAWHPDGFTFSTGNQDKTCRVWDIRNLSKSVAVLRGNLGAIRSIRYTSDGKYMAMAEPADFVHVYDVSNGYETEQEIDFFGEISGISFSPDTEALFIGVWDRTYGSLIEYSRRHNYSYLDSFL

SEQ ID NO: 4206 - protein, 329 aa, Arabidopsis thaliana
MTDSAYRVDTISRLAQWRIHNLSSSTYRKSDPFKMGLWNWHLSVEKSKMLLNVKLYPEVSNLTRENPPVASFALRVVSSTGERKALSHPEVIDKRIKTNEDFIWTIEVPLTGKIIIDVEFLDLKVLSQDSGELYSIWANGSTENQSQVTAVTSLGRMLTESIYTDITINASDGSIGAHRAVLAARSPVFRSMFLHDLKEKELSEINVLDMPLDACQAFLSYIYGNIQNEDFLIHRLALLQAAEKYDIADLKEACHLSLLDDIDTKNVLERLQNAYLYQLPELKASCMRYLVKFGKIFEIRDEFNIFMQCADRDLISEIFHEVLSTWKGF

SEQ ID NO: 4207 - protein, 25 aa, Arabidopsis thaliana
MRAKWKKKRMRRLKRKRRKMRQRSK

SEQ ID NO: 4208 - protein, 293 aa, Arabidopsis thaliana
MWSVMGLVRRTAMSSTVNKASPVRSLLGGFRCLNVESKEEDEKKDMTVLEAKKLMRLVNVEDMKKKLIGMGDKEMVTYTTLIEASQGLGIARSLDEAHAFARVLDDAGVILIFRDKVYLHPHKVVDLIRKAVPLGLNPDDELIREEFDKMRSMKEEIDVLAHQQVRKILWGGLGYSVVQIGIFVRLTFWEFSWDVMEPITFFTTATGIIVGYAYFLMTSRDPTYQDFMKRLFLSRQRKLLKSHKFDAERFKELENKWKITSCSSSSCHANASIRNRVGVDLDLEDSLQSHHRD

SEQ ID NO: 4209 - protein, 692 aa, Arabidopsis thaliana
MGCICSKGVRTNDDYIETNHVSIGKENPKASKKQSDSEETSVNGNEATLRLIPDDVKDTFSDEEVEELEEKKESSFEMKSCESVLQKGNVLEIVDNVGPLQPRMSRIGSVSNGDRAAKVIAGWPSWLVSVAGEAINGWIPRSADSFEKLEMIGQGTYSSVYRARDLETNQIVALKKVRFANMDPESVRFMAREIIILRRLNHPNVMKLEGLIISKASGSMYLIFEYMDHDLAGLASTPGIKFSQAQIKCYMKQLLLGLEHCHSCGVLHRDIKCSNLLLDRNNNLKIGDFGLSNFYRGQRKQPLTSRVVTLWYRPPELLLGSTDYGVTVDLWSTGCILAELFTGKPLLPGRTEVEQMHKIFKLCGSPSEEYWRRSRLRHATIFKPQHPYKRCVADTFKDLPSSALALLEVLLAVEPDARGTASSALQSEFFTTKPFPSEPSSLPRYQPRKEFDAKLREEEARRRKGSSSKQNEQKRLARESKAVPAPSANAELLASIQKRLGETNRTSISEKFNPEGDSGNGFRIEPLKGNTAQNPYPIYTNGDNHPNGSSQLRTQRSYVQRGSGQLSRFSNSMAPTRDGSQFGSMRDAIVNQRWLEDGSENFNLSQRLLEKPNGIRKDDPSSSSKESIMGYDGEKRGRIQYSGPLIPGEGNLDEMLKEHERQILLAVRRAQADKAKRDDNRQAQTLFPANGR

SEQ ID NO: 4210 - protein, 290 aa, Arabidopsis thaliana
MAFTLGGRARRLVSATSVHQNGCLHKLQQIGSDRFQLGEAKAIRLLPRRTNMVQELGIREEFMDLNRETETSYDFLDEMRHRFLKFKRQKYLPEIEKFKALAIAQSPKVMVIGCADSRVCPSYVLGFQPGEAFTIRNVANLVTPVQNGPTETNSALEFAVTTLQVENIIVMGHSNCGGIAALMSHQNHQGQHSSLVERWVMNGKAAKLRTQLASSHLSFDEQCRNCEKESIKDSVMNLITYSWIRDRVKRGEVKIHGCYYNLSDCSLEKWRLSSDKTNYGFYISDREIWS

SEQ ID NO: 4211 - protein, 678 aa, Arabidopsis thaliana
MMMRTVALPLSHDLNVHKIHEASGFHNSAAGKNRVYLTRTGLSSCATRQDVWSLQLLESLSGSIVPVSSRCNAFVCRSALSPGNGNEGPILKSTAVIFTRVYDALGGNPHLVKLIPAVGILAFATWGLRPLLRLARTTLFEKGNDANSQKSSTQYIVVSYLQPLLLWSGAILLCRTLDPIVLPSSAGQAIKQRLLIFARSISTVLAFSCCLSSLLQQVQKFFMETNNPADTRNMGFSFAGKAVYTAAWVAAASLFMELLGFSTQKWLTAGGLGTVLLTLAGREILTNFLSSIMIHATRPFVLNEWIQTKIGGYEVSGTVEQVGWWSPTIIRGDDREAVHIPNHQFSVNIVRNLTQKTHWRIKTHLAISHLDVSKINNIVADMRKVLSKNPQIEQQKIHRRVFLEDIDPENQALRILISCFVKTSRFEEYLCVKEAVLLDLLTVIRHHGARLATPIRTVQRMRNEAEVDTAGFSDIVFNQAAMNRRYMLIEPSYKINSDDNSKSPSPSPGQKSPSPGQKSEERDLQEEPSETKAETENNGSVPVSNAKKENQKAALGSNSNTGTKGSSTSTSDQPVAQKSEEKKKESVGDPHKAEKDEVSDDEATIEQTLKSKAKQGSEKNNGESKARDGGGSGTSSLLEENLVLGVALDGSKRTLPIDEEHKASGALMDSEELGIGSE

SEQ ID NO: 4212 - protein, 2655 aa, Arabidopsis thaliana
MAASPAKFFFGFLIVSIVLWMIFILCSRLFAWMLSRVLGASVVFRVGGWKCLKDVVVKFKKGAIESVSASEIKLSLRQSLVKLGVGFLSRDPKVQVLISDLEVVMRSSTSTTNLQKAKSHKPRTSGRGKWMVVANVARFLSVSVADMVVKTTKVIVEVKELKLDINKDGGTKPNLYVKLNVLPILVHLCESRIISDQSSNVSFECCPASQASSASPDRSAATLFCDELSLSSEFGHDRAVGIVVRNVEVTSGDVILNFDEDSFPKSKQSSASLRSDEVRTSATAASSAKKPHKEHQLVAALAKYSSSFPEKVSFSLPKLDVRCVNREHDLLAENNITGIQLRSVKSKSFEDTGESTRLDVQMELSEIHVFREADSSILEIMKVDVVSFIYIPVQPVLPIRAEVDIKLGGTRCNLFISRLQPWLRLHFLKKKKLVLQEKTHNLEKTKAADMKAIMWTGTVSAPEMTVMLYGTEDIPLYHFCSQSSHVFANNVSSLGTAVHVELGELNLHLADEYQECFREHLFGIEPNSGSLMHIAKVSLDWGRRDRTSSDEVGFRSKLVLSVDVTGMGIYFSFKRVQSLIINALSFKALFKTLSVTGKKMNKTVSVQPSKGSGKGTRLVNINLERCCVNFCDDTGLDNTVIDDPKSVNYGSQGGRVSFSSLADGTPRTASILSTAPEACKRLKYSVSLEISQFSFCLNKDKLSTQMELGRAKSIYQEYLEEHTPCSNVILFDMHNAKLVRRSGGLNEIDVCSLFSATHISLGWEPDVHLSFYELFLRLRSLVYAQRHKEPESGCNKGISSVKDGGPSEKINQSNSVNKQKKKESMFAIDVETLTISAEVGDGVEVKLEAQSIFSENACIGVLLEGLMLAFNGSRVFKTTRMQVSRIPTATNLSDAVPVMTDGPWDWVVQGLDVHICMPYKLQLRAIDDSIEEMLRGLKLISVAKGKHILSGKRESSKPKKSSPKFGRIKFCIRRLTADIEEEPIQGWLDEHYQLVKKEACELAVRLKFLEDLIHKAGQSPKGAETSAVLDERKMFFDGVEIDVEDPVAINKVKEEIHKRSFQSYYQACQGLAPSEGSGACREGFQAGFKPSAARTSLLSVCATDFDLSLTAVHGGDAGLIEVLKKLDPICEENDIPFSRLYGSNVYLNTGSLVVQLRNYTLPLLSGTSGKCEGRIVLAQQATCFQPQISQDVFVGRWRKVKMFRSASGTTPPLKTYSDLRIHFEQGEVSFGVGYEPAFADISYAFTVALRRANLSHRNPDMVQVIKKERSLPWWDDMRNYVHGNITLSFSESKWSVLATTDPYESLDQLQIVSGPIELKQSDGRVFVSAKDFKIKLSSLESLISRHSLKVPVRASGAAFIEAPDFNLEVTMDWDCESGNSLNHYLYAFPAEGKPREKVFDPFRSTSLSLRWNFSLRPEKFHQSPSSTEHPTDVGTVYSSQDKPDSIPLASPTMNLGAHDLAWILKFWGLNYYPPHKLRSFSRWPRFGVPRAARSGNLSLDKVMTEFMLRVDATPSLIKYMPWDSDDPAKGLTFNMAKLKYELCYSRGKQKYTFECKRDALDLVYQGLDLHVPKAFINKDEHPCIPGSVQVLRKSTQDALIDRVPSGKDHKRYEKHRDEGFLLSSDYFTIRRQAPKADPERLLAWQEAGRRNLEMTYVRSEFENGSESDEHIRSDPSDDDGYNVVIADNCQRVFVYGLKLLWTIENRDAVWSFVGGISKAFEPPKPSPSRQYTQRKIHEENQKESCPETHQGEMSRSSASPGRNLPSSPSHSIKIEKSDDIGTVETIESEEEGTRHFMVNVIEPQFNLHSEEANTSHIFKQCAEKNISFRCRKEFEQKKIYYWNLLLLKKYIFELHDDIINQQNYFCYCLCGRVLARSFHSIMRVGVEVIEQALGTGSVKIPECSPEMTWTRMEVSVMLEHVQAHVAPTDVDPGAGLQWLPKIRRNSPKVKRTGALLERVFMPCDMYFRYTRHKGGTPDLKVKPLKELTFNSHNIIATMTSRQFQVMLDVLTNLLFARLPKPRKSSLQCPTEDEDVEEEADEVVPYGVEEVELAKINLEEKERERKLLLDDIRKLSPCSDNMDDTHIEREGELWMISTRRSILVQGLKKELTYAQKSRKAASASLRMALQKAAQLRIMEKEKNKSPSYAMCISLQINKVVWSMLVDGKSFAEAEINDMIYDFDRDYKDIGVARFTTKYFVVRNCLPNAKSDMLLSAWNPPPEWGKKVMLRVDAKQGAPKDAHYPLELFHVEIYPLRIHLTETMYRMMWEYFFPEEEQDSQSRQEVWKISTTAGSKRVKKGLVGHESSGHAIKDVEASRMSSSALSASAAVQSQSNDDSVQKSNVICLRSSTGASAQELRRTSSFDREENVAEPIANELVLQAHSCNVSSSIEQQEDFSKQKVKEIKPVKSGRSSHEEKKAGKSHEEKKSRPRKMMEFHNIKISQVELLVTYEGSRFVVNDLKLLMDTFHRVEFTGTWRRLFSRVKKHIIWGVLKSVTGMQGKKFKDKSHNNRESTDNDLNLSDNDQTGKPDQQQVTWFKRQSDGAGDGFVTSIRGLFNTQRRKAKAFVLRTMRGEAENDFHGDWSDSDVEFSPFARQLTITKAKRLIRRHTKKFRPRSQRGSTSQQRESLPSSPIETTPFESGYSSGSSPYEDFRE

SEQ ID NO: 4213 - protein, 794 aa, Arabidopsis thaliana
MLHRLRWFIGLSKRSREAKTLDAKPYISKVKPVLMVDTVQEIAIYIHRFHNLDLFQQGWYQIKITMRWEDGDNVTRGIPSRVVQYEAPDSGANDSYGVWKIVDKDNSFLTQPFRIKYARQDIRLCMMISFTLPLERYEGSATSAAILKFELMYAPSVDNASAKQLDTSPVAVHEFRIPPKALTGLHSYCPVHFDTLHAVLIDVSVHISVLKSAAYKRPASLSSGVSNSKNVSGSSAQSFKKALGLLASADKKLVSFVKALLGARGILLEEMQRLSKAVGQTIDLSDFVSNMNNVQLSNSTSTGSGQGKEQNSLENLNITFDLTSDDWLHELSKDHLSRIFHLLGTQLHYLWNTLLGFHRDNHTKILEYLRDIWTKDRRAEWSIWMVYSKVEMPHHFINSGMTDILNQSAHKRASGVLNEPAQIAATRAELHRRSIAQMRINNRSIQDMHILGDPMRVPIVIIERVLNAPRRTLSDNSYLRHMDLLDSSLLNGHKDEAEKTKVTNSQQSARELKIVVFVHGFQGHHLDLRLVRNQWLLIDPKIEFLMSEANEEKTHGDFREMGQRLAQEVVSFLKRKKDRYARQGHLKSIKLSFVGHSIGNVIIRTAIADSLMEPYRKYLHTYLSLSGPHLGYLYSTNSLFNSGLWLLKKLKSTQVIHQLTLTDDPDLRHTFFYKLCKQKTLENFKNIILLSSPQDGYVPYHSARIESCQPASFDSSKRGVAFLEMLNNCLDQIRGPVPEAPHQQRVFMRCDVNFDMTVYGRNLNSFIGRAAHIEFLESDIFARFIMWSFQDLFR

SEQ ID NO: 4214 - protein, 1138 aa, Arabidopsis thaliana
MAGELVSFAVNKLWDLLSHEYTLFQGVEDQVAELKSDLNLLKSFLKDADAKKHTSALVRYCVEEIKDIVYDAEDVLETFVQKEKLGTTSGIRKHIKRLTCIVPDRREIALYIGHVSKRITRVIRDMQSFGVQQMIVDDYMHPLRNREREIRRTFPKDNESGFVALEENVKKLVGYFVEEDNYQVVSITGMGGLGKTTLARQVFNHDMVTKKFDKLAWVSVSQDFTLKNVWQNILGDLKPKEEETKEEEKKILEMTEYTLQRELYQLLEMSKSLIVLDDIWKKEDWEVIKPIFPPTKGWKLLLTSRNESIVAPTNTKYFNFKPECLKTDDSWKLFQRIAFPINDASEFEIDEEMEKLGEKMIEHCGGLPLAIKVLGGMLAEKYTSHDWRRLSENIGSHLVGGRTNFNDDNNNSCNYVLSLSFEELPSYLKHCFLYLAHFPEDYEIKVENLSYYWAAEEIFQPRHYDGEIIRDVGDVYIEELVRRNMVISERDVKTSRFETCHLHDMMREVCLLKAKEENFLQITSNPPSTANFQSTVTSRRLVYQYPTTLHVEKDINNPKLRSLVVVTLGSWNMAGSSFTRLELLRVLDLVQAKLKGGKLASCIGKLIHLRYLSLEYAEVTHIPYSLGNLKLLIYLNLHISLSSRSNFVPNVLMGMQELRYLALPSLIERKTKLELSNLVKLETLENFSTKNSSLEDLRGMVRLRTLTIELIEETSLETLAASIGGLKYLEKLEIDDLGSKMRTKEAGIVFDFVHLKRLRLELYMPRLSKEQHFPSHLTTLYLQHCRLEEDPMPILEKLLQLKELELGHKSFSGKKMVCSSCGFPQLQKLSISGLKEWEDWKVEESSMPLLLTLNIFDCRKLKQLPDEHLPSHLTAISLKKCGLEDPIPTLERLVHLKELSLSELCGRIMVCTGGGFPQLHKLDLSELDGLEEWIVEDGSMPRLHTLEIRRCLKLKKLPNGFPQLQNLHLTEVEEWEEGMIVKQGSMPLLHTLYIWHCPKLPGEQHFPSHLTTVFLLGMYVEEDPMRILEKLLHLKNVSLFQSFSGKRMVCSGGGFPQLQKLSIREIEWEEWIVEQGSMPLLHTLYIGVCPNLKELPDGLRFIYSLKNLIVSKRWKKRLSEGGEDYYKVQHIPSVEFDD

SEQ ID NO: 4215 - protein, 383 aa, Arabidopsis thaliana
MDPTQISHLALDIGGTLIKLVYFSANGDYSEESRNGCSVVKGRLCFAKFETRKIDDCLEFIRFNILHHSGVQQPNGEGHDKLYVKATGGGAFKFADLFKEKLGILFDKEDEMCSLVGGVNFLLKTVPREAFTYLDGQKKFVEIDHNDLYPYLLVNIGSGVSMIKVDGDGKYERISGTSLGGGTFLGLGKLLTKCKSFDELLELSHHGNNRVIDMLVGDIYGGTDYSKIGLSSTAIASSFGKAISDGKELEDYQPEDVARSLLRMISNNIGQIAYLNALRFGLKRIFFGGFFIRGLEYTMDTISVAVHFWSRGEAKAMFLRHEGFLGALGAFTSYNDQSHNDLKPHHHTVQRAILNCSGHNFRHIPVTSNLNESETIECSINLV

SEQ ID NO: 4216 - protein, 375 aa, Arabidopsis thaliana
MVTKAEKQFAKNFNIDDLPDVPAGLPPHLKAQQTRVVSKNNAPAHTASAIYSGTYVSSTEEDDNVKLGNFYDNFKVDVVSLTKTDMEFDMIGIDAAFANAFRRILIAEVPSMAIEKVLIAYNTSVIIDEVLAHRMGLIPIAADPRLFEYLSEHDQANEKNTIVFKLHVKCPKNRPRLKVLTSDLKWLPNGSELLRESENKTSKPKTYTSFSCSQDSLPEFANNPITPCDLDILIAKLAPGQEIELEAHAVKGIGKTHAKWSPVGTAWYRMHPEVVLRGEVEDELAERLVNVCPQNVFDIEDMGKGKKRATVAQPRKCTLCKECVRDDDLVDHVDLGSVKNHFIFNIESTGSLPPEVLFTEAVKILEAKCEAITDF

SEQ ID NO: 4217 - protein, 781 aa, Arabidopsis thaliana
MGYCSMKSSWIGVSLMPAERVFSNGDVYSGQLKGTLPHGKGKYAWPDGIIYEGDWEEGKISGRGKLMWSSGAKYEGDFSGGYLHGFGTLTSPDGSVYAGAWRMNVRHGLGRKEYCNSDVYDGSWREGLQDGSGSYSWYNGNRFIGNWKKGKMSGRGVMSWANGDLFNGFWLNGLRHGSGVYKYADGGFYFGTWSRGLKDGSGVFYPAGSKHPSLKKWHRHFGYDDTGNFLLSHNSTINIDDLRTSKAVSRSLSELTTTSGLTRTSERYPDDYWSTSDPPRDFMHHGPSSKSARSVDSGQSEIRDKNPIVFEREYMQGVLIKERIMSSIDMSHRARPLNLTKEVTVSACVSFLGGKWNHYLMLNLQLGIRYTVGKITPVPPREVRASDFSERARIMMFFPRNGSQYTPPHKSIDFDWKDYCPMVFRNLREMFKLDAADYMMSICGDDGLREISSPGKSGSIFYLSHDDRFVIKTLKRSELKVLLRMLPRYYEHVGDYENTLITKFFGVHRIKLKWGKKVRFVVMGNMFCTELKIHRRYDLKGSTQGRYTEKNKIGEKTTLKDLDLAYEFHMDKLLREALFKQIILDCSFLESLQILDYSLLLGLHFRAPDPLTDILEPPNEMSDQESDSVGSVDVNLPREPSIPPKGLLMVTHEPNSVNTAPGPHIRGSTLRAFSVGEKEVDLILPGTARLRVQLGVNMPAQAHHKLGQDNEESGTVELFEVYDVVVYMGIIDILQEYNMKKKVEHTCKSMKYDPMTISAIEPTLYSKRFIDFLLKVFPEKA

SEQ ID NO: 4218 - protein, 243 aa, Arabidopsis thaliana
MSLFRIFINQLEEDDEDMATSKKMITREEWEKKLNAVKLRKEDMNTLVMNFLVTEGYVEAAEKFQRESGTKPEIDLATITDRMAVKKAVQNGNVEDAIEKVNDLNPEILDTNPELFFHLQQQRLIELIRQGKTEEALEFAQEELAPRGEENQAFLEELEKTVALLVFDDASTCPVKELLDLSHRLKTASEVNAAILTSQSHEKDPKLPSLLKMLIWAQTQLDEKAVYPHINDLSTGKLEDPSE

SEQ ID NO: 4219 - protein, 118 aa, Arabidopsis thaliana
MEANIRLSEEVVNKTRSFEKMKSEAERCLAQGEKLCDEKTEFENATYAKFLSVLNAKKAKLRAVRDKEDSVRAVEEEESTYKAESFESGRSDDEQSGEEASEKATSSKARGGKRAARS

SEQ ID NO: 4220 - protein, 273 aa, Arabidopsis thaliana
MAAQALVSSSLTSSVQTARQIFGSKPVASASQKKSSFVVKAAATPPVKQGANRPLWFASSQSLSYLDGSLPGDYGFDPLGLSDPEGTGGFIEPRWLAYGEIINGRFAMLGAAGAIAPEILGKAGLIPAETALPWFQTGVIPPAGTYTYWADNYTLFVLEMALMGFAEHRRLQDWYNPGSMGKQYFLGLEKGLAGSGNPAYPGGPFFNPLGFGKDEKSLKELKLKEVKNGRLAMLAILGYFIQGLVTGVGPYQNLLDHLADPVNNNVLTSLKFH

SEQ ID NO: 4221 - protein, 516 aa, Arabidopsis thaliana
MKTFANFAILFLLQSLLFPLYSSCLHQTSDDSSPFPSDFLFGTASSAFQYEGAFLTDGKGLNNWDVFAHENPGKIVDGSNGDIATDQYHRYMEDIQSMNFLGVNSYRLSISWSRVLPNGRFGVINYKGIKYYNNLIDALIKKGITPFVTLNHFDYPQELENRFKSWLSSEMQKDFGYLADICFKHFGDRVKHWITINEPNQHISLAYRSGLFPPARCSMPYGNCTHGNSETEPFIAAHNMILAHAKAIQIYRTKYQREQKGIIGIVVQTSWFEPISDSIADKNAAERAQSFYSNWILDPVVYGKYPEEMVNLLGSALPKFSSNEMNSLMSYKSDFLGINHYTSYFIQDCLITACNSGDGASKSEGLALKLDRKGNVSIGELTDVNWQHIDPNGFRKMLNYLKNRYHNIPMYITENGFGQLQKPETTVEELLHDTKRIQYLSGYLDALKAAMRDGANVKGYFAWSLLDNFEWLYGYKVRFGLFHVDFTTLKRTPKQSATWYKNFIEQNVNIEDQIDK

SEQ ID NO: 4222 - protein, 378 aa, Arabidopsis thaliana
MPRLPSSRRGVVWFRWKILITISTALCILALFCINRQSNSTATTTTLSSSLSVARSRIPLVKYSGDRPKLAFLFLARRDLPLDFLWDRFFKSADQRNFSIYVHSIPGFVFDESSTRSHFFYNRQLKNSIEVVWGESSMIAAERLLLASALEDPSNQRFVLLSDSCVPLYDFGYIYRYLVSSPKSFVDSFLDKDNRYTMKMFPVIRKEKWRKGSQWISLIRSHAEVIVNDDTVFPVFQKFCKRSLPLDPRKNWLYLKKRRHNCIPDEHYVQTLLTMRGLENEMERRTVTYTTWNLSAKKAEAKSWHPLTFTSDNCGPEEIEGIKKINHVYYESEYRTEWCRANSKPVPCFLFARKFTRGAAMRLLSEGLIESSIDTTTF

SEQ ID NO: 4223 - protein, 457 aa, Arabidopsis thaliana
MAPAQNPISSQHVVVIGAGAAGLVAARELSREGHTVVVLEREKEVGGLWIYSPKAESDPLSLDPTRSIVHSSVYESLRTNLPRECMGFTDFPFVPRFDDESRDSRRYPSHMEVLAYLQDFAREFNLEEMVRFEIEVVRVEPVNGKWRVWSKTSGGVSHDEIFDAVVVCSGHYTEPNVAHIPGIKSWPGKQIHSHNYRVPGPFENEVVVVIGNFASGADISRDIAKVAKEVHIASRASEFDTYEKLPVPRNNLWIHSEIDTAYEDGSIVFKNGKVVYADSIVYCTGYKYRFTFLETNGYMNIDENRVEHLYKHVFPPALSPGLSFVGLPSMGIQFVMFEIQSKWVAAVLSRRVTLPTEDKMMEDISAWYASLDAVGIPKRYTHKLGKIQSEYLNWVAEECGCPLVEHWRNQQIVRGYQRLVSHPETYRDEWDDNDLMEEAYEDFARKKLISFHPSHIL

SEQ ID NO: 4224 - protein, 282 aa, Arabidopsis thaliana
MSNHQTKQVLKQLEPWCELKDKVVLVTGASSGIGREICLDLCKAGCKIVAAARRVDRLNSLCSEINSFGAIGVQAAALELDVSSDADTIRKAVKEAWEIFGTIDVLINNAGIRGNVKSSLDLSKEEWDKVFRTNLTGSWLISKYVCLLMRDAKRGGSVINVSSISGLHRGLLRGGLAYACSKGGVDTMTRMMAIELAVYKIRVNSIAPGIFRSEITQGLFQKEWLEKVTEKIVPLKMQQTVDPGLTSLVRYLIHDSSQYVTGNTYIVDSGATLPGVPIFSSL

SEQ ID NO: 4225 - protein, 224 aa, Arabidopsis thaliana
MKLIWSPETASKAYIDTVKSCENLGTPGAAELVAAMAAGWNANLIVETWSEGETIAISVGLNIASRHTNGRHICIVPNARSQTAYLQAMAEQSCSNLPETIIMNEEGEELEHTMQTLQGIDFLVVDWDQKDFAANVLRNAVFGSRGAVVVCRSGYRRSTSCFSWTKAFSDRNVVRTVTLPVSGGLEIAHVAAARSSGKSDNNSNKRKWIKHFDQRSGEEHVIRK

SEQ ID NO: 4226 - protein, 708 aa, Arabidopsis thaliana
MVAFGKYLQRKQIEEWSGYYINYKLMKKKVKQYAEQIQGGSQHPRHVLKDFSRMLDTQILKVNHCLQIETTVLFMLEQQGLLSGRLAKLRESHDAILEQPDISRIFELREAYRDVGRDLLQLLKFVELNAIGLRKILKKFDKRFGYRFADYYVKTRANHPYSQLQQVFKHVGVGAVVGAISRNLHELQENEGSFYSIYDQPVLPAQDPVVEAINNAVDKLTFSTNFLNFLAQHALIMQDDLVTPSEDTIDERSYHFNSLLLNLGNTFLYMVNTYIIVPTADDYSMSLGAAATVCGVVIGSMAVAQVFSSVYFSAWSNKSYFKPLVFSSIALFIGNLMYALAYDANSIALLLLGRVCCGLGSARAVNRRYISDCVPLRIRMQASAGFVSASALGMACGPALAGLLQIKFKFYKFTFNQSTLPGWVMAVAWLFYLVWLCISFREPLRDTEDGEKNNRNETTSATDRVESSRVEEGLRLPLLITSGIKPEDEEECDESEESPEDSHKPANSFIEAYRLLTPSVKVQLLIYFMLKYSMEILLSESSVITSYYFSWTTSSVAIFLACLGLTVLPINILVGSYISNMFEDRQILLTSEIIVFLGILFSFNLFVPYTVPQYVISGLIMFVAAEVLEGVNLSLLSRVMSSRLSKGTYNGGLLSTEAGTLARVVADATITLGGYLGRGHLLNATLLPSLVICIGSIVATCCTYNSLY

SEQ ID NO: 4227 - protein, 361 aa, Arabidopsis thaliana
MDGREAMAFPGSHSQYYLQRGAFTNLAPSQVASGLHAPPPHTGLRPMSNPNIHHPQANNPGPPFSDFGHTIHMGVVSSASDADVQPPPPPPPPEEPMVKRKRGRPRKYGEPMVSNKSRDSSPMSDPNEPKRARGRPPGTGRKQRLANLGEWMNTSAGLAFAPHVISIGAGEDIAAKVLSFSQQRPRALCIMSGTGTISSVTLCKPGSTDRHLTYEGPFEIISFGGSYLVNEEGGSRSRTGGLSVSLSRPDGSIIAGGVDMLIAANLVQVVACSFVYGARAKTHNNNNKTIRQEKEPNEEDNNSEMETTPGSAAEPAASAGQQTPQNFSSQGIRGWPGSGSGSGRSLDICRNPLTDFDLTRG

SEQ ID NO: 4228 - protein, 689 aa, Arabidopsis thaliana
MEKKRSPRSSKSPGPAIFPKSPLVYESYKSGCGWKLIKFFDFGHVKSGNKRLGSEKKKFVRDSAGNVYTKSQLDLLKKLHEKCQCNDRIVEEERSCKPKTRRRSLSSDRELEKYESKPVQGLLEREIRRIKNLKDETCDVPDKQKQSSLSEIENDSDKQMDMKNGRDCKKSSEINLQACVNEAAETFICSKAEEKGKDRSKQFMEALDILSSNKELFITLLQDPHSFSAKKSLDLEGSKVKEPRDKSPSMADDLDSIVLLKPRLSSSVDDKVYLRFKHLAKKLKLVVGSNKDSNHAENKPEGSSRGREIEAAAFRTSDVSTSTVGHRSPESPVFRRKKRVESDVFKLSIENDVLPRRFMVERQQERLNSSPVYEVPYALSSLQTKLKERRQKLEKKRESFKLWSLDKNFEVFDPNPYNSNLRFLENNCTGSSEYKSLRTHVEDGFVEDRYLESSLAETNLSLERQDCNIHDPKQEQEQPSPVSVLERIHLEDETVIPGNVKISNLEEKIGLSFDDPNIDLIEKESVHEFVKKVLEASRLNWTNLMARCNEDTSLLDEFSHGSHNDQLLLVLDYTDEILREIYRQDIKFWPFSPSKSSRVLNLESSLREDDLIHETMRHFDWSLLCSDSPTRSLDQIIETDLIKPCLWLDFGGESEGVVSDIVEKIQQQLVLEISHELRTMQRSILCRLI

SEQ ID NO: 4229 - protein, 829 aa, Arabidopsis thaliana
MDSKQMLLSALGVGVGVGVGLGLASGQAVGKWAGGNSSSNNAVTADKMEKEILRQVVDGRESKITFDEFPYYLSEQTRVLLTSAAYVHLKHFDASKYTRNLSPASRAILLSGPAELYQQMLAKALAHFFDAKLLLLDVNDFALKIQSKYGSGNTESSSFKRSPSESALEQLSGLFSSFSILPQREESKAGGTLRRQSSGVDIKSSSMEGSSNPPKLRRNSSAAANISNLASSSNQVSAPLKRSSSWSFDEKLLVQSLYKVLAYVSKANPIVLYLRDVENFLFRSQRTYNLFQKLLQKLSGPVLILGSRIVDLSSEDAQEIDEKLSAVFPYNIDIRPPEDETHLVSWKSQLERDMNMIQTQDNRNHIMEVLSENDLICDDLESISFEDTKVLSNYIEEIVVSALSYHLMNNKDPEYRNGKLVISSISLSHGFSLFREGKAGGREKLKQKTKEESSKEVKAESIKPETKTESVTTVSSKEEPEKEAKAEKVTPKAPEVAPDNEFEKRIRPEVIPAEEINVTFKDIGALDEIKESLQELVMLPLRRPDLFTGGLLKPCRGILLFGPPGTGKTMLAKAIAKEAGASFINVSMSTITSKWFGEDEKNVRALFTLASKVSPTIIFVDEVDSMLGQRTRVGEHEAMRKIKNEFMSHWDGLMTKPGERILVLAATNRPFDLDEAIIRRFERRIMVGLPAVENREKILRTLLAKEKVDENLDYKELAMMTEGYTGSDLKNLCTTAAYRPVRELIQQERIKDTEKKKQREPTKAGEEDEGKEERVITLRPLNRQDFKEAKNQVAASFAAEGAGMGELKQWNELYGEGGSRKKEQLTYFL

SEQ ID NO: 4230 - protein, 646 aa, Arabidopsis thaliana
MHSRFQNIAFAGNSSSNSYKILGRSLQVEVPEAADTTLRLDSLASPLSNAKGIKRKWNLIDGADPLLSLRLGHSSSSSDSKGSSATACTSLSSARETEEASSMDIELDFSLHLGNEKPTASNKKPANLKMKGLQVPSPKFDLELSLSGGGSCQSEITAVQQHANRFQSLADMLRANNEESATCGWRQGFGLPTLQASSSKETSSFLGHIPKNVIIPAAHVLELSSNTAATTPISSGTCTSGLSQQLKPQLKNSSSSKLCQVEGCHKGARGASGRCISHGGGRRCQKHGCHKGAEGRTVYCKAHGGGRRCEFLGCTKSAEGRTDFCIAHGGGRRCSHEDCTRAARGRSGLCIRHGGGKRCQRENCTKSAEGLSGLCISHGGGRRCQSNGCTKGAQGSTMFCKAHGGGKRCTHSGCTKGAEGSTPFCKGHGGGKRCAFQGDDPCSKSVHGGTNFCVAHGGGKRCAVPECTKSARGRTDFCVRHGGGKRCQSEGCGKSAQGSTDFCKAHGGGKRCAWGQPETEYAGQSSSGPCTSFARGKTGLCALHNSLVQDNRVHGGMTITSESQEPRVSSSETENEEEFSGSQDMNMDTMKARSATGSPETDVDLNEYEAGLGLAPEGRVHGGSLMMAMLGRDGGSGSTGGPKRWM

SEQ ID NO: 4231 - protein, 190 aa, Arabidopsis thaliana
MASKRILKELKDLQKDPPTSCSAVDNASKLLVLIELEDCCRRFSNCSCILLLEKSQDIAMAHVLLCPVAEDMFHWQATIMGPSDSPYSGGVFLVTIHFPPDYPFKPPKVAFRTKVFHPNVNSNGSICLDILKEQWSPALTISKVLLSICSLLTDPNPDDPLVPEIAHMYKTDRAKYESTARSWTQKYAMG

SEQ ID NO: 4232 - protein, 524 aa, Arabidopsis thaliana
MEEADFVQKDPTGRYIRYNDVLGRGAFKTVYKAFDEVEGIEVAWNLMSIEDVLQMPGQLDRLYSEVHLLNSLKHDNIIKLFYSWVDDHNKSINMITELFTSGSLTLYRKKHRKVDPKAIMNWARQILKGLHYLHSQTPPVIHRDLKCDNIFVNGNTGKVKIGDLGLAAVMQQPTARSVIGTPEFMAPELYEEEYNELVDIYSFGMCMLEMVTCEYPYRECRNQAQIYKKVTSGIKPQSLSKVDDPQVKQFIEKCLLPAPSRPTALELLKDQLLAVDGAKDSTLTASSNTTFKPAMPPQCEYRPMDVEYKKNTSVSICSSAKSSQECALLQTMEVQRVAESTEFKLSGERRDDVAASMALRIAGSSGQARKVDFDFNLKTDTARAVTGEMVEELDLSSHEVTVIAEMIDELIMKLKANRSLPNANSVYQSKDEEAGESMKSEISADYYHRVSSNEGSRLGCCCEAVESLLSSFLDSCSMVSNKQSEDLKTELNVIESQYNQSCQRLLRMKEEAIEKAKRKWMKLS

SEQ ID NO: 4233 - protein, 468 aa, Arabidopsis thaliana
MSYGWAIYEGTVVIASLSLLGWAGLWFLNRRLYKEYEEKRALVQIIFSVVFAFSCNLLQLVLFEIIPVLSREARMINWKVDLFCLILLLVFMLPYYHCYLMLRNSGVRRERASVGAFLFLSAFLYAFWRMGVHFPMPSADKGFFTMPQLVSRIGVIGVTLMAVLSGFGAVNLPYSYISLFIREIEEADIISLERQLIQSTETCIAKKKKIILCQLEVERNQGSEENQKRSSFFRRIVGTVVRSVQDDQKEQDIKILEAEVEALEELSKQLFLEVYELRQAKDAAAYSRTWKGHVQNLLGYACSIYCVYKMLKSLQSVVFKEAGTKDPVTTMISIFLRLFDIGVDAALLSQYISLLFIGMLIVISVRGFLTNLMKFFFAVSRVGSGSSSNVVLFLSEIMGMYFLSSILLIRKSLRNEYRGIITDVLGGDIQFDFYHRWFDAIFVASAFLSLVLLSAHYTSRQSDKHAIE

SEQ ID NO: 4234 - protein, 876 aa, Arabidopsis thaliana
MNTYSPLQLIPTPIHLKSSRAASPSSLRVASPLIIRAASSDDSQSVENQTLEVLEWRALCNQLSPFASTTMGLSATKNAEIPVGNSPEESRNLLNETSAALAAMEMMKSRGLGLSEIQDLSDIVERAVSGQLLTVRELCTVRSTLTAATSTFQKLRKAAISDNRVTPLVDILQGCDFKDTLQQKISFCIDCNMTMILDRASEDLEIIRSERRRNMENLDSLLKKISTKIFLAGGINKPLITQRRSRMCVAIRATHKSLLPGGVVLSVSSSRATCFIEPKEAVELNNMEVRHANSEKAEEMAILSILTSEVVMAQREILHLLDRILELDIAFARASHANWINGVYPNVTSEHTKTPGLAVDIDSAQHPLLLGSVLGSPNGGDIFPVPVDIKVESSAKVVVISGPNTGGKTALLKTLGLLSLMSKSGMYLPAKNCPRLPWFDLILADIGDPQSLEQSLSTFSGHISRIRQILDIASENSLVLLDEICSGTDPSEGVALATSILQYIKNRVNVAVVSTHYGDLSRLKDNEPRFQNAAMEFSMETLQPTFRVLWGSTGLSNALRVAKSIGFNKRILENAHKWTEKLNPEQDVERKGSLFQSLMEERNKLKLQATKTAAFHRDLMNLYHELEHESHDLDKRERALLKKETQKVQEDLNSAKSKMERLVAEFESQLEITQADQYNSLILKTEEAVAEIIEACCPMDPDSLEEEYSDYSPQAGEKVLVTGLGDKLGTVVEEPGDDDDTVLVQHGKIRVRIKKKDIKPLPRSTSSQTSNRSLRSKRQINMKELGSVLQMQSEPVRIQTSKNTLDLRGMRAEEAVHQLDMAISGRDSGSILFIIHGMGAGIIKELVLERLRKNTRVSRYEQANPMNHGCTVAYIK

SEQ ID NO: 4235 - protein, 497 aa, Arabidopsis thaliana
MDKKKNSFPDNLPEGTISELMQKQNNVQPSVIVIGSGISGLAAARNLSEASFKVTVLESRDRIGGRIHTDYSFGCPVDMGASWLHGVSDENPLAPIIRRLGLTLYRTSGDDSILYDHDLESYGLFDMHGNKIPPQLVTKVGDAFKRILEETEKIRDETANDMSVLQGISIVLDRNPELRQEGMAYEVLQWYLCRMEAWFAVDANLISLKCWDQDECLSGGHGLMVQGYEPVIRTIAKDLDIRLNHRVTKVVRTSNNKVIVAVEGGTNFVADAVIITVPIGVLKANLIQFEPELPQWKTSAISGLGVGNENKIALRFDRAFWPNVEFLGMVAPTSYACGYFLNLHKATGHPVLVYMAAGNLAQDLEKLSDEATANFVMLQLKKMFPDAPDPAQYLVTRWGTDPNTLGCYAYDVVGMPEDLYPRLGEPVDNIFFGGEAVNVEHQGSAHGAFLAGVSASQNCQRYIFERLGAWEKLKLVSLMGNSDILETATVPLQISRM

SEQ ID NO: 4236 - protein, 348 aa, Arabidopsis thaliana
MARSGGNDGHRAGDSRLSKRQRLPPSPDESEEELDPELFEEPSNLEGYEDGEFEEDEEEFEEEEEELEEEEDEEEEEEENVTTDEQSGSPKSSQPVKLQSSDVLDCPTCCEPLKRPIYQCSNGHLACSSCCQKLNKKCSFCRCNIGDIRCRAMEKVIEASIVPCPNAKHGCKETTTYCNQSSHEKVCKFVRCSCPVSNCNYVSSYSNLKSHACSTAHVWGEDDIHFQLVIDRPRIFNMNLGRKKTVVFKEEKEGDLIVVQAFKGLEGVYVTVNRIAHMAPGIRDLSCSLAKLNEYSTLRSGSLVKKIQKVREKMHLEDDLMWIPPKMLSGDHWKMQICIAYGYKFIHI

SEQ ID NO: 4237 - protein, 288 aa, Arabidopsis thaliana
MSQVDNRNSSAAKRARTDGGRREDDWICPSCGNVNFSFRTTCNMRNCTQPRPADHNGKSAPKPMQHQQGFSSPGAYLGSGGPPPVYMGGSPYGSPLFNGSSMPPYDVPFSGGSPYHFNYNSRMPAGAHYRPLHMSGPPPYHGGSMMGSGGMYGMPPPIDRYGLGMAMGPGSAAAMMPRPRFYPDEKSQKRDSTRDNDWTCPNCGNVNFSFRTVCNMRKCNTPKPGSQQGGSSDKISKQNAPEGSWKCDNCGNINYPFRSKCNRQNCGADKPGDRSNGSPSRAPEENDQ

SEQ ID NO: 4238 - protein, 376 aa, Arabidopsis thaliana
MQAFALSGKKRIVNHGMCFSKGNLDLGSRLSENFMDDPLIPGLPDDVAKQCLALVPRARFPSMGSVCKKWRFVVQSKEFITVRRLAGMLEEWLYVLTMNAGGKDNRWEVMDCLGQKLSSLPPMPGPAKTGFKVVVVDGKLLVIAGCCMINGSLVASADVYQYDTCLNSWSRLADLEVARYDFACAEVNGHVYVVGGHGVDGESLSSAEVYDPETCTWTFIESLRRPRWGCFASAFNGKLYVMGGRSNFTIGNSKLLDVYNTQCGSWHGSKNGLTMVTAHVEVGKKLFCIDWKNHRKMSVFNAEDETWEVVALPLSGSSRAGFQFGKLSGKLLLFSSQEETGQCTLLYDPDASPGTQWKTSEIKLSGSCVCSVTITA

SEQ ID NO: 4239 - protein, 456 aa, Arabidopsis thaliana
MESQQQQSPAVETPLLLNSNQDHQDRPSPEIDGGGGGGGGEGVNDDLDRTLEWLETFLTLLGFNQSSKQSLVLSWIVFLSIGLVLPVTVLELGHCLGCERYQYKSFELNIVVSQALLAGVSLLCVSHNLRKHGIRKFLFVDQLSGRMDRLKAQYIQQILNSVRLLAVWSLPCFALKGVREIIRMYYVPHDQPWLSVAILLSMILSWTYLSTIFLAASAMFHLVCNLQVIHFEDYAKLLEGESEISLFIYEHMRLRHYLSKISHRFRIFLLLQFLVVTASQFTTLFQTTAYSGRITYINGGDFAVSAVVQVVGIILCLHAATKISHRAQAIASVASRWHAMMSCSSTDSTQIRASPSGVHLEATTNPPISFPISRSDSDVESMDHYMRMPVTNQFPSYMSMSSYHKRQAFVLYLQMNPGGITIFGWTVDRHLINTIFFIELSLVTFVLGKTVVFGTE

SEQ ID NO: 4240 - protein, 453 aa, Arabidopsis thaliana
MLEVLQAIVLFILFWVWLSWMGGSSSKESPRGGGSGRRYERSVSGSSSYSSAWDQSSYYQTPNHPSASPVSSYNSGRQTPKNLERKYSRIADNYRSIDEVTAALSHAGLESSNLIVGIDVTKSNEWTGARSFGRKSLHFIGTTPNPYQQAISIIGKTLSVFDEDNLIPCYGFGDATTHDQDVFSFNPNDTYCNGFEEVLMCYREIVPQLRLSGPTSFAPIIERAMTIVEESGGQYHVLLIIADGQVTRSVDTDNGGFSPQEQQTIDAIVRASEYPLSIVLVGVGDGPWDTMRQFDDNIPARAFDNFQFVNFTDIMSKNIDPARKEAEFALSALMEIPSQYKATLELGLLGQRTGHCPDRIALPPPTYATQSMRNSPRTSRSTSFQNKPYDNGVSSTPPSTTHNESQQQFCPVCLVSAKNMAFNCGHQTCAGCGEDLHVCPICRSSISVRIKLY

SEQ ID NO: 4241 - protein, 631 aa, Arabidopsis thaliana
MKFMKLGSRPDTFYTSEDLRCVSSEVSSDFTIEVSGSRYLLHKFPLLSKCLRLQRMCSESPESIIQLPEFPGGVEAFELCAKFCYGITITISAYNIVAARCAAEYLQMSEEVEKGNLVYKLEVFFNSCILNGWRDSIVTLQTTKAFPLWSEDLAITSRCIEAIASKVLSHPSKVSLSHSHSRRVRDDDMSSNRAAASSRGWWAEDIAELGIDLYWRTMIAIKSGGKVPASLIGDALRVYASKWLPTLQRNRKVVKKKEDSDSDSDTDTSSKHRLLLESIISLLPAEKGAVSCSFLLKLLKAANILNASTSSKMELARRVALQLEEATVSDLLIPPMSYKSELLYDVDIVATILEQFMVQGQTSPPTSPLRGKKGMMDRRRRSRSAENIDLEFQESRRSSSASHSSKLKVAKLVDGYLQQIARDVNLPLSKFVTLAESVPEFSRLDHDDLYRAIDIYLKAHKNLNKSERKRVCRVLDCKKLSMEACMHAAQNEMLPLRVVVQVLFYEQARAAAATNNGEKNTTELPSNIKALLAAHNIDPSNPNAAAFSTTTSIAAPEDRWSVSGLKSPKSKLSGTLRSKLAEDEEVDERFMNGDGGRTPSRFKAFCAIPGRPKKMFSKLLSINRNSSDKNC

SEQ ID NO: 4242 - protein, 419 aa, Arabidopsis thaliana
MIDYERSNTTKNINTHHHNPPPSSSSSDLLPDGNGTAVTQKRKRRPAGTPDPEAEVVSLSPRTLLESDRYVCEICNQGFQRDQNLQMHRRRHKVPWKLLKRETNEEVRKRVYVCPEPTCLHHNPCHALGDLVGIKKHFRRKHSNHKQWICERCSKGYAVQSDYKAHLKTCGTRGHSCDCGRVFSRVESFIEHQDTCTVRRSQPSNHRLHEQQQHTTNATQTASTAENNENGDLSIGPILPGHPLQRRQSPPSEQQPSTLLYPFVTNGSIELQLLPSRNCADETSLSLSIGTMDQKTMSEVEKKSYEKGETSLEREEARRETKRQIEIAELEFAEAKRIRQHARAELHKAHLFREEASRRISATMMQITCHNCKQHFQAPAALVPPPPQTHCTDESTSLAVSYMSSATTEGEKASDRASS

SEQ ID NO: 4243 - protein, 273 aa, Arabidopsis thaliana
MWMATQSNSGFDSLSSMMSRHAINFQSNTSSEMTPMSPYLGMNMNMINVGSPGFLQTGNSSNGSDSGSGLKLDTSMVSEWSNEEQYILDAGLEKYKDMPSIDMYIQIGNTLPDKSIRDIALRCRWLRRKRRKSEELNCGRRASSSKGKQVESSSKSSIPSVLPHNMASYPFSGPSTSTSKQITSEDLSSYATNLIEQNVRAFSQIRANLSSYKAGDNLDLFRQARNNLITIQNEINNMPGLMNKMPPLPVTINDDLSVMMPFNTMQSGGFHRK

SEQ ID NO: 4244 - protein, 436 aa, Arabidopsis thaliana
MASREGKRRNHNHDDEKLVPLAALISRETKAAKMEKPIVRFGQAAQSRKGEDYVLIKTDSLRVPSNSSTAFSVFAVFDGHNGKAAAVYTRENLLNHVISALPSGLSRDEWLHALPRALVSGFVKTDKEFQSRGETSGTTATFVIVDGWTVTVACVGDSRCILDTKGGSVSNLTVDHRLEDNTEERERVTASGGEVGRLSIVGGVEIGPLRCWPGGLCLSRSIGDMDVGEFIVPVPFVKQVKLSNLGGRLIIASDGIWDALSSEVAAKTCRGLSAELAARQVVKEALRRRGLKDDTTCIVVDIIPPENFQEPPPSPPKKHNNFFKSLLFRKKSNSSNKLSKKLSTVGIVEELFEEGSAMLAERLGSGDCSKESTTGGGIFTCAICQLDLAPSEGISVHAGSIFSTSLKPWQGPFLCTDCRDKKDAMEGKRPSGVKVI

SEQ ID NO: 4245 - protein, 324 aa, Arabidopsis thaliana
MVAIRKEQSLSGVSSEIKKRAKRNTLSSLPQETQPLRKVRIIVNDPYATDDSSSDEEELKVPKPRKMKRIVREINFPSMEVSEQPSESSSQDSTKTDGKIAVSASPAVPRKKPVGVRQRKWGKWAAEIRDPIKKTRTWLGTFDTLEEAAKAYDAKKLEFDAIVAGNVSTTKRDVSSSETSQCSRSSPVVPVEQDDTSASALTCVNNPDDVSTVAPTAPTPNVPAGGNKETLFDFDFTNLQIPDFGFLAEEQQDLDFDCFLADDQFDDFGLLDDIQGFEDNGPSALPDFDFADVEDLQLADSSFGFLDQLAPINISCPLKSFAAS

SEQ ID NO: 4246 - protein, 486 aa, Arabidopsis thaliana
MDLSAKDEFSAEKRNPDNYDSVNNPSGDWRVDSYPSENLISAGPASCSPSQMMDSFGQTLWYDPTSVQAVGYAGFNGGNASSSSFRGSIDRSLEMGWNLPNLLPPKGNGLFLPNASSFLPPSMAQFPADSGFIERAARFSLFSGGNFSDMVNQPLGNSEAIGLFLQGGGTMQGQCQSNELNVGEPHNDVSVAVKESTVRSSEQAKPNVPGSGNVSEDTQSSGGNGQKGRETSSNTKKRKRNGQKNSEAAQSHRSQQSEEEPDNNGDEKRNDEQSPNSPGKKSNSGKQQGKQSSDPPKDGYIHVRARRGQATNSHSLAERVRREKISERMKFLQDLVPGCNKVTGKAVMLDEIINYVQSLQRQVEFLSMKLATVNPQMDFNLEGLLAKDALQLRAGSSSTTPFPPNMSMAYPPLPHGFMQQTLSSIGRTITSPLSPMNGGFKRQETNGWEGDLQNVIHINYGAGDVTPDPQAAATASLPAANMKVEP

SEQ ID NO: 4247 - protein, 405 aa, Arabidopsis thaliana
MDSWSYGRSVFMSNETLLPCDTFAKNRRFEQRLSNNDDVLISDMAGNSNGFSAVSITKVVPEEEDEENISSSSKFSSQELNRIDFKLRSFLDLGNDDDDTSSRGFALPSKKSRASNLCSQNPLCQVYGCSKDLSSSKDYHKRHRVCEAHSKTSVVIVNGLEQRFCQQCSRFHFLSEFDDGKRSCRRRLAGHNERRRKPAFYFLPGKRHKLLRTSQDVVGNKFLENSSLVLPESFPGSLLYRVIDEDDHRTSRLVSFKDEPTCSMFPTNEQNSSRTYESKPAIYSTEVSSIWDLHETAASRSTRALSLLSAQSQQHLSKFPNTTFSITQPNQNLNHSSSTDYHQMEQPLWIDPGKTNSAGSSSCKGKGTSTVDLLQLSSHLQRIEQQRNYTGDVKQEYNELYFPGS

SEQ ID NO: 4248 - protein, 325 aa, Arabidopsis thaliana
MDPDPDHNHRPNFPLQLLDSSTSSSSTSLAIISTTSEPNSEPKKPPPKRTSTKDRHTKVEGRGRRIRMPAMCAARVFQLTRELGHKSDGETIEWLLQQAEPAVIAATGTGTIPANFTSLNISLRSSRSSLSAAHLRTTPSSYYFHSPHQSMTHHLQHQHQVRPKNESHSSSSSSSQLLDHNQMGNYLVQSTAGSLPTSQSPATAPFWSSGDNTQNLWAFNINPHHSGVVAGDVYNPNSGGSGGGSGVHLMNFAAPIALFSGQPLASGYGGGGGGGGEHSHYGVLAALNAAYRPVAETGNHNNNQQNRDGDHHHNHQEDGSTSHHS

SEQ ID NO: 4249 - protein, 98 aa, Arabidopsis thaliana
MSTGGAFGGNRGLRPIPPEKGIFPLDHLHECDAEKKEYLGCLKSSAHKSEQCRHLSKKYLQCRMAKNLMAKQDMAELGFSGVKELDSTEDKNTESIEH

SEQ ID NO: 4250 - protein, 286 aa, Arabidopsis thaliana
MGQALGCIQVDQSNVAIKETFGKFDEVLEPGCHCLPWCLGSQVAGHLSLRVQQLDVRCETKTKDNVFVTVVASIQYRALAESAQDAFYKLSNTRNQIQAYVFDVIRASVPKLDLDSTFEQKNDIAKTVETELEKAMSHYGYEIVQTLIVDIEPDVHVKRAMNEINAASRMREAASEKAEAEKILQIKRAEGEAESKYLSGMGIARQRQAIVDGLRNSVLAFSESVPGTSSKDVMDMVLVTQYFDTLKEIGASSKSNSVFIPHGPGAVRDIASQIRDGLLQGNSAAE

SEQ ID NO: 4251 - protein, 620 aa, Arabidopsis thaliana
MVLEDRKDGSSLPGRSGSFSKSSPSELDVVDPYKRISSPGSILDAEKVEKKPGGWRAVSFILGNETLERLGSIGLLANFMVYLTKVFHLEQVDAANVINIWSGFTNLTPLVGAYISDTYVGRFKTIAFASFATLLGLITITLTASFPQLHPASCNSQDPLSCGGPNKLQIGVLLLGLCFLSVGSGGIRPCSIPFGVDQFDQRTEEGVKGVASFFNWYYMTFTVVLIITQTVVVYIQDQVSWIIGFSIPTGLMALAVVMFFAGMKRYVYVKPEGSIFSGIAQVIVAARKKRKLKLPAEDDGTVTYYDPAIKSSVLSKLHRSNQFRCLDKAAVVIEGDLTPEGPPADKWRLCSVQEVEEVKCLIRIVPIWSAGIISLAAMTTQGTFTVSQALKMDRNLGPKFEIPAGSLSVISLLTIGIFLPFYDRVFVPFMRRITGHKSGITLLQRIGTGIVFAIFSMIVAGIVERMRRIRSINAGDPTGMTPMSVFWLSPQLILMGLCEAFNIIGQIEFFNSQFPEHMRSIANSLFSLSFAGSSYLSSFLVTVVHKFSGGHDRPDWLNKNLNAGKLDYFYYLIAVLGVVNLVYFWYCARGYRYKVGLPIEDFEEDKSSDDVEMTSKKSMK

SEQ ID NO: 4252 - protein, 523 aa, Arabidopsis thaliana
MSQNPSLFFLLCLGLGFCVDLGQSLKVPFSVNDVLPMLPRQVSWPVLNSFHNAVDLLPVFIGSVTPNNVSIEWKGACFNGNEARLDITGSDRDVPGLGGGVLHLKTSKAHSLTCMDLYVFATPYRITWDYYFSARDHTLNFDSWEEKAELEYVKEHGVSVFLMPSGMLGTLLSLIDVLPLFSNTAWGQNANLAFLTKHMGATFEKRSQPWRSMINPEDVHSGDFLAVSKIRGRWGGFETLEKWVTGAFAGHTAVCLKDDLGNLWVGESGHENEKGEEIIVVIPWDEWWELTLKDNSNPQVALLPLHPDIRAKFNNTAAWEYARSMLGKPYGYHNMIFSWIDTLGDNYPPPLDAHLVISVMSMWTRVQPAYAANMWNEALNKRLGTEDLDLYGILEETARRGMSFDELLTIPEQDEWVYSDGKSTTCVAFILAMYKAAGIFDPLADHIQVTEFTIRDAYTLKLFESNQTRLPSWCNTEEGKLDFCQILGEYRMELPGYNTIYPYPNMNQNCPSLPPNYERPSKC

SEQ ID NO: 4253 - protein, 509 aa, Arabidopsis thaliana
MGRDFLVLSILILLLSGIVSSAPSANSPAKILNGFISNHGSSLMKWLWSLKTTTKTTIATRSMVKFENGYSVETVFDGSKLGIEPYSIEVLPNGELLILDSENSNIYKISSSLSLYSRPRLVTGSPEGYPGHVDGRLRDAKLNHPKGLTVDDRGNIYVADTVNNAIRKISEGGVTTIAGGKTVRNGGHVDGPSEDAKFSNDFDVVYVGSSCSLLVIDRGNKAIREIQLHFDDCAYQYGSGFPLGIAVLVAAGFFGYMLALLQRRVGSIVSSHNDQEMFEADPDQKPMKHSRPSLIPAGDEQLEKQEETFVVSLGKLVSNAWESVMEILRKKQTGTSFQQYHGTTKQSAAFSTSTPWPIQESFVIRDEDGPPPVEPRNPTPRKTYAFMSKDAEKMQQLRQSRAFYSSWDAEFPNQQQQQQKQHQKHQHQQQQQQQHRRHYSSIPHTYYEQDSEKSNEIVFGAVQEQSSKRVAKPKPKPIESGDQMNNNTQQNLHYRSHSVSYPYGYYPNT

SEQ ID NO: 4254 - protein, 510 aa, Arabidopsis thaliana
MAALAPGILQKLIQGMKTGIKPTREHRSSMLQVTDIVPIDLDEKSLEPKQGFLIKISDSSHSIYVSLPSDQDDVVLSNKLQLGQFIYVDRLEPGSPVPVIKGAKPIPGRHPLLGTPETLVVPKERTDQEIGSKPRRGSWGQNVDFSSSPFVVKPMALEFDHSTPAKRSVSARFAASPIRRGGVRCSFGGGVLGKLEGESPATAMLRKSCFVSSASKFPRSRSVCDRQAKKNNASLFSPFKSSLEAQEDVVPLSTSKKIKPEKDTNLSGRLNILSKEATQLREVAQKVALQALREATITEIVVRHTKTFTNLSKSAKADCPAVCFEKFMEFHQQMAQTIGELTSIEVAATPDAENKSQNINARTENQKPTEEGSSSILHEIAYNSIDQEKRRSKRRIVLKQQSEGKTVRSNDENKNPASGGISNTIRLAKEIEDEAANWFMEFIEIALEKGMKKSRGPDDADVKKVPQSLILGVLNWIEVEQSDSNNNKRRRVHPKASKITRKLRIKLKNP

SEQ ID NO: 4255 - protein, 195 aa, Arabidopsis thaliana
MASSISTGVKFVPEEDNFLQRHVAFFDRNKDGIVYPSETFQGFRAIGCGYLLSAVASVFINIGLSSKTRPGKGFSIWFPIEVKNIHLAKHGSDSGVYDKDGRFVASKFEEIFTKHAHTHRDALTNEELKQLLKANKEPNDRKGWLAGYTEWKVLHYLCKDKNGLLHKDTVRAAYDGSLFEKLEKQRSSKTSKKHP

SEQ ID NO: 4256 - protein, 140 aa, Arabidopsis thaliana
MLLYNKQKKNQNAKGNRILISVTVLGSAGPIRFVAYEDDLVASVIDTALKGYAREGRLPLLGSDFNDFLLYCPMVGPEALSTWDAIGSLGARNFMLCRKPEEKKVEESNGRSDSTINGARKGGSLKAWINKSFNLKVSSH

SEQ ID NO: 4257 - protein, 628 aa, Arabidopsis thaliana
MAGGAITPDSLIGLIAEINEIPGNFGLFKKDCSDLARRVGLLTHLIEEIRDSSPPSESDASSSLNSHECDWWSDLVVGLQAAKRLLSSATSFQARESSDGAAKRISFQFQCVTWKLEKALGDLTYDRYDISDEVREQVELARLQLRRAMQRYGSLNSKKFSSGLSEPMEKDASSNRKVIEKLESIPETVHSLSDEKKFESPPPWKSSSVSLAFFLSKDGDDERLEKAVTENSDDSQKSDNLTIPEDFLCPISLELMKDPAIVSTGQTYERSFIQRWIDCGNLSCPKTQQKLENFTLTPNYVLRSLISQWCTKHNIEQPGGYMNGRTKNSDGSFRDLSGDMSAIRALVCKLSSQSIEDRRTAVSEIRSLSKRSTDNRILIAEAGAIPVLVKLLTSDGDTETQENAVTCILNLSIYEHNKELIMLAGAVTSIVLVLRAGSMEARENAAATLFSLSLADENKIIIGASGAIMALVDLLQYGSVRGKKDAATALFNLCIYQGNKGRAVRAGIVKPLVKMLTDSSSERMADEALTILSVLASNQVAKTAILRANAIPPLIDCLQKDQPRNRENAAAILLCLCKRDTEKLISIGRLGAVVPLMELSRDGTERAKRKANSLLELLRKSSRKLGSL

SEQ ID NO: 4258 - protein, 328 aa, Arabidopsis thaliana
MAIFEWRHRRRPFDGGGTRRRRFFSPLYSRNFKRTILFAVIFLAIFPPLYFHFKLRRIRQIVAQKCDWLHHPPLVCAHGGDSTLAFPNTMDAYSFAIRSRVDCIEVDVSRSSDGVLFALHNRDLQRIARNSSVQVGDLSMKQIKELDVSEIVKGTLGSSRIPTLEEALALISNSVRKVILDAKVGPPMYEKGLAQDILSIIERAQCNNCIVWAKSDTLARDIIRRAPDTMVGYIVMVDPLTGARNSLLRMKGARVVGVYHPLIDEELVRVVRRRNKEVYAWTVDDADPMKRMLHLGVDAVVTSDPSMFQGLMEDLRTECLEEGFSIRT

SEQ ID NO: 4259 - protein, 491 aa, Arabidopsis thaliana
MSKLRFFQSLLISTVICFFLPSINARGGHSDHIHPGDGNYSFHGIVRHLFAQEEPTPSLELTRGYMTNDDLEKAMKDFTKRCSKISRLYSIGKSVNGFPLWVIEISDRPGEIEAEPAFKYIGNVHGDEPVGRELLLRLANWICDNYKKDPLAQMIVENVHLHIMPSLNPDGFSIRKRNNANNVDLNRDFPDQFFPFNDDLNLRQPETKAIMTWLRDIRFTASATLHGGALVANFPWDGTEDKRKYYYACPDDETFRFLARIYSKSHRNMSLSKEFEEGITNGASWYPIYGGMQDWNYIYGGCFELTLEISDNKWPKASELSTIWDYNRKSMLNLVASLVKTGVHGRIFSLDKGKPLPGLVVVKGINYTVKAHQTYADYHRLLVPGQKYEVTASSPGYKSKTTTVWLGENAVTADFILIPETSSRGNQLRSSCDCSCKSCGQPLLTQFFTETNNGITLTLFVVVVFLCFLLQRRVRFNLWKQRQSSRRSITV

SEQ ID NO: 4260 - protein, 306 aa, Arabidopsis thaliana
MAPTRILTRDEELGVISDDDDSPSGKRSKLDRFPLSRWELAVSLGVFLVFSSGLCCIYMTMPAAEFGKLKLPRSLADLRLLKDNLANYANEYPAQFVLGYCATYIFMQTFMIPGTIFMSLLAGALFGVFKGVVLVVFNATAGATSCFFLSKLIGRPLITWLWPDKLRFFQAEISKRRDKLLNYMLFLRITPTLPNLFINLASPIVDVPFHVFFLATLIGLIPAAYITVRAGLAIGDLKSVKDLYDFKTFQGEASLQYTWPNIQCHTENKNTLNLFRGHNRTKLLIRLLVTCQITEIIQFFVQDERP

SEQ ID NO: 4261 - protein, 448 aa, Arabidopsis thaliana
MNRALVLLLYVCTVSCLASSKVILMRNNITLSFDDIEANFAPSVKGTGEIGVVYVAEPLDACQNLMNKPEQSSNETSPFVLIVRGGCSFEEKVRKAQRAGFKAAIIYDNEDRGTLIAMAGNSGGIRIHAVFVTKETGEVLKEYAGFPDTKVWLIPSFENSAWSIMAVSFISLLAMSAVLATCFFVRRHRIRRRTSRSSRVREFHGMSRRLVKAMPSLIFSSFHEDNTTAFTCAICLEDYTVGDKLRLLPCCHKFHAACVDSWLTSWRTFCPVCKRDARTSTGEPPASESTPLLSSAASSFTSSSLHSSVRSSALLIGPSLGSLPTSISFSPAYASSSYIRQSFQSSSNRRSPPISVSRSSVDLRQQAASPSPSPSQRSYISHMASPQSLGYPTISPFNTRYMSPYRPSPSNASPAMAGSSNYPLNPLRYSESAGTFSPYASANSLPDC

SEQ ID NO: 4262 - protein, 538 aa, Arabidopsis thaliana
MAITYSSADELGNTTEGFLEIRENTSGGWKSARLIIVVQMAERFAYFGIASNLIMYLTGPLGESTAAAAANVNAWTGTVAFLPLLGGFLADSYLGRFRTIIISSSLYILGLGLLSFSTMIPSHQSKDSNQLQETIFFFSLYLVAIGQGGYNPCIKVFGADQFDGNDHKEARDKSSFFNWLMFGNCISILTTRLVSTYIQENLSWSLGFGIPSVSMLLSLFLFLLGTTSYRFSTERVGKKNPFARISRVFMEALKNRRQPDLDIANANANETLLLLAHQSSKQFRFLDRAAISCELAEIEEAKAVLRLIPIWITSVVYTIVHAQSPTFFTKQGATMDRSISPGLLVPAATLQSFINLSVVVFIPIYDRLLVPFARSFTQNSSGITTLQRIGTGIFLSILAMVLAALVETKRLQAARDELSIPMSVWWLIPQYVIFGVSDMFTMVGLQEFFYGQVPSELRSVGMALNLSIYGAGNYLSSFMISVIDKITNQYGQRSWFDNDLDQAHLDYFYWLLACLGFIGFAFYLWFAKSYVYSRSNTF

SEQ ID NO: 4263 - protein, 165 aa, Arabidopsis thaliana
MSASVLSDPTMLISTPEVILVSPVSVTQISGDEPDSVTCDCCGLTEECTQSYIEMVRERYMGKWICGLCSEAVKYEVMRTKRLLTTEEAMARHMNMCNKFKSSSPPPNPTGHLISAMRQILRKSLDSPRMLRSMPNSPSKDDQDHHHDCVSNVLSRSDSCFASLT

SEQ ID NO: 4264 - protein, 511 aa, Arabidopsis thaliana
MEEMTPAVAMTLSLAANTMCESSPVEITQLKNVTDAADLLSDSENQSFCNGGTECTMEDVSELEEVGEQDLLKTLSDTRSGSSNVFDEDDVLSVVEDNSAVISEGLLVVDAGSELSLSNTAMEIDNGRVLATAIIVGESSIEQVPTAEVLIAGVNQDTNTSEVVIRLPDENSNHLVKGRSVYELDCIPLWGTVSIQGNRSEMEDAFAVSPHFLKLPIKMLMGDHEGMSPSLTHLTGHFFGVYDGHGGHKVADYCRDRLHFALAEEIERIKDELCKRNTGEGRQVQWDKVFTSCFLTVDGEIEGKIGRAVVGSSDKVLEAVASETVGSTAVVALVCSSHIVVSNCGDSRAVLFRGKEAMPLSVDHKPDREDEYARIENAGGKVIQWQGARVFGVLAMSRSIGDRYLKPYVIPEPEVTFMPRSREDECLILASDGLWDVMNNQEVCEIARRRILMWHKKNGAPPLAERGKGIDPACQAAADYLSMLALQKGSKDNISIIVIDLKAQRKFKTRT

SEQ ID NO: 4265 - protein, 349 aa, Arabidopsis thaliana
MNLGAAEEESAQEIHLPADINWEMLDKSKFFVLGAALFSGVSGALYPAVLMKTRQQVCHSQGSCIKTAFTLVRHEGLRGLYRGFGTSLMGTIPARALYMTALEVTKSNVGSAAVSLGLTEAKAAAVANAVGGLSAAMAAQLVWTPVDVVSQRLMVQGSAGLVNASRCNYVNGFDAFRKIVRADGPKGLYRGFGISILTYAPSNAVWWASYSVAQRMVWGGIGCYVCKKDEESGNNSTTMKPDSKTIMAVQGVSAAIAGSVSALITMPLDTIKTRLQVLDGEDSSNNGKRGPSIGQTVRNLVREGGWTACYRGLGPRCASMSMSATTMITTYEFLKRLSAKNHDGFYSKS

SEQ ID NO: 4266 - protein, 341 aa, Arabidopsis thaliana
MMHQMLNKKDSATHSTLPYLNTSISWGVVPTDSVANRRGSAESLSLKVDSRPGHIQTTKQISFQDQDSSSTQSTGQSYTEVASSGDDNPSRQISFSAKSGSEITQRKGFASNPKQGSMTGFPNIHFAPAQANFSFHYADPHYGGLLAATYLPQAPTCNPQMVSMIPGRVPLPAELTETDPVFVNAKQYHAIMRRRQQRAKLEAQNKLIRARKVPYLHESRHVHALKRPRGSGGRFLNTKKLLQESEQAAAREQEQDKLGQQVNRKTNMSRFEAHMLQNNKDRSSTTSGSDITSVSDGADIFGHTEFQFSGFPTPINRAMLVHGQSNDMHGGGDMHHFSVHI

SEQ ID NO: 4267 - protein, 697 aa, Arabidopsis thaliana
MAMTSWPSTGRQRRHQLASMLLLVLVVVGIYVPVFALLPSLSYTPQSLPSAIPQDEKMISRKFYIKDDNFWKDGNRFQIIGGDLHYFRVLPEYWEDRLLRANALGLNTIQVYVPWNLHEPKPGKMVFEGIGDLVSFLKLCEKLDFLVMLRAGPYICGEWDLGGFPAWLLAVKPRLQLRTSDPVYLKLVERWWDVLLPKVFPLLYSNGGPVIMVQIENEYGSYGNDKAYLRKLVSMARGHLGDDIIVYTTDGGTKETLDKGTVPVADVYSAVDFSTGDDPWPIFKLQKKFNAPGRSPPLSSEFYTGWLTHWGEKITKTDAEFTAASLEKILSRNGSAVLYMVHGGTNFGFYNGANTGSEESDYKPDLTSYDYDAPIKESGDIDNPKFQALQRVIKKYNASPHPISPSNKQRKAYGSIKMQMTTSLFDLVRMTDPADVITSANPISMESVGQMFGFLLYESSYIAKKSGNTLRIPKVHDRAQVFVSCLSQDVDVGVLRYIGTTERWNNQPISLPTIECTTNTSLFILVENMGRVNYGPYIFDDKGILSSVYLDGQILHGWKMIPIPFHNLNQEPNLTFEMQHTKNRSKKFELTNDVGRKEPALFAGEFSINSEEEIKDTYLSFNGWGKGVAFVNEFNIGRYWPSVGPQCNLYVPAPLLKRGKNTLVVFELESPHLELSLEAVDHQDFTCGSNVSKVNQL

SEQ ID NO: 4268 - protein, 722 aa, Arabidopsis thaliana
MSFVVGVGGSGSGSGGDGGGSHHHDGSETDRKKKRYHRHTAQQIQRLESSFKECPHPDEKQRNQLSRELGLAPRQIKFWFQNRRTQLKAQHERADNSALKAENDKIRCENIAIREALKHAICPNCGGPPVSEDPYFDEQKLRIENAHLREELERMSTIASKYMGRPISQLSTLHPMHISPLDLSMTSLTGCGPFGHGPSLDFDLLPGSSMAVGPNNNLQSQPNLAISDMDKPIMTGIALTAMEELLRLLQTNEPLWTRTDGCRDILNLGSYENVFPRSSNRGKNQNFRVEASRSSGIVFMNAMALVDMFMDCVKWTELFPSIIAASKTLAVISSGMGGTHEGALHLLYEEMEVLSPLVATREFCELRYCQQTEQGSWIVVNVSYDLPQFVSHSQSYRFPSGCLIQDMPNGYSKVTWVEHIETEEKELVHELYREIIHRGIAFGADRWVTTLQRMCERFASLSVPASSSRDLGGVILSPEGKRSMMRLAQRMISNYCLSVSRSNNTRSTVVSELNEVGIRVTAHKSPEPNGTVLCAATTFWLPNSPQNVFNFLKDERTRPQWDVLSNGNAVQEVAHISNGSHPGNCISVLRGSNATHSNNMLILQESSTDSSGAFVVYSPVDLAALNIAMSGEDPSYIPLLSSGFTISPDGNGSNSEQGGASTSSGRASASGSLITVGFQIMVSNLPTAKLNMESVETVNNLIGTTVHQIKTALSGPTASTTA

SEQ ID NO: 4269 - protein, 942 aa, Arabidopsis thaliana
MSSSSQAMLQKSDSIAEKMPDALKQSRYHMKRCFASFVGGGKKLMKREHLMNEIEKCIEDSRERSKILEGLFGYILTCTQEAAVVPPFVALAARPNPGFWEYVKVNSGDLTVDEITATDYLKLKESVFDESWSKDENALEIDFGAIDFTSPRLSLSSSIGKGADYISKFISSKLGGKSDKLEPLLNYLLRLNHHGENLMINDDLNTVAKLQKSLMLAVIVVSTYSKHTPYETFAQRLKEMGFEKGWGDTAERVKETMIILSEVLEAPDNGKLDLLFSRLPTVFNVVIFSVHGYFGQQDVLGLPDTGGQVVYILDQVRALEEELLIRINQQGLGFKPQILVVTRLIPEARGTKCDQELEAIEGTKHSHILRVPFVTNKGVLRQWVSRFDIYPYLERFTQDATSKILQRLDCKPDLIIGNYTDGNLVASLMATKLGVTQGTIAHALEKTKYEDSDAKWKELDPKYHFSCQFTADLIAMNVTDFIITSTYQEIAGSKDRPGQYESHTAFTMPGLCRVVSGIDVFDPKFNIAAPGADQSVYFPYTEKDKRFTKFHPSIQELLYNEKDNAEHMGYLADREKPIIFSMARLDTVKNITGLVEWYGKDKRLREMANLVVVAGFFDMSKSNDREEKAEIKKMHDLIEKYKLKGKFRWIAAQTDRYRNSELYRCIADTKGVFVQPALYEAFGLTVIEAMNCGLPTFATNQGGPAEIIVDGVSGFHIDPNNGDESVTKIGDFFSKCRSDGLYWDNISKGGLKRIYECYTWKIYAEKLLKMGSLYGFWRQVNEDQKKAKKRYIEMLYNLQFKQLTKKVTIPEDKPLPLRLASLRNLLPKKTTNLGAGSKQKEVTETEKTKQKSKDGQEQHDVKVGEREVREGLLAADASERVKKVLESSEEKQKLEKMKIAYGQQHSQGASPVRNLFWSVVVCLYICYILKQRFFGANSAQEY

SEQ ID NO: 4270 - protein, 357 aa, Arabidopsis thaliana
MTSVSVAVVAPPHRCPFSSHLNLNKLSLQIPRTGWRRKQLGFALASTAASESPSEATYDPELRLVFELATDSELYELEKILFGPSYFSPLLKSIPNKGGGDRLMIGQDIEVRDGFIEALESRFLFLAADARSTLRGWRPSYRNVLLAVRNNLNIPCSSQLPTEDLEAEIFLYLVDNFSSEASGVFPGMWENSEVSEAEGSLELGLSKWKVELLAALQVGATEVQSMILKGGGMITFAKVYQLLAKKLSGKVFLEAANYQIRKEMLKKGGQFAAINLESRAALLAAKHGFAGAASRYIGLKTAMQLLGPMMWGTLLADLVIQMLETDYARILRAIYAFAQDCFVLQIRITRTYRLPCK

SEQ ID NO: 4271 - protein, 463 aa, Arabidopsis thaliana
MICSSKGTILIARGKNSNTIPRLPLKGSSTNYANRIQIRNPISVKTFRRSSSSSMAVETMSMGSDSSTLILTSGASGRVRVLFSMRELKRLVTIIQSLILFLLLPFRVVVWRRRTGAVVIRDDKQERKVWSPPQIVVRKRNIGGESSVSPPSVPAAVVDGEVAVRRELAIKRVLEDEGGDGSSVRDYSLFTTKRGDTLFSQSWSPLSPNHRGLIVLLHGLNEHSGRYSDFAKQLNANGFKVYGIDWIGHGGSDGLHAYVPSLDYAVTDLKSFLEKVFTENPGLPCFCFGHSTGGAIILKAMLDPKIESRVSGIALTSPAVGVQPSHPIFAVLAPIMAFLLPRYQISAANKKGMPVSRDPAALIAKYSDPLVFTGSIRVKTGYEILRITAHLQQNLNKVKVPFLVMHGTDDTVTDPSASKKLYEEAASSDKSLKLYDGLLHDLLFEPEREIIAGAILDWLNQRV

SEQ ID NO: 4272 - protein, 1025 aa, Arabidopsis thaliana
MAAKLLHSLADDSADLQKQIGCMNGIFQIFDRHHVLTGRRKSLTLGNGNAININYERDSVDTIYQQKETFQDSNIGGNVKEKRRVSTESSRVSFSSSCSSSPSSSEFNRGVQPDASAYDRANFQESPTSDPEMTEGNGFSHLGLDLRDVVRDSMYREARGLLSKTPMTREEVVRQSRREDSPRPYGLKQSTPMDLNESFRVLARLRETSQHYNELGMKDAPRYSVDSHDTLKSRQKLKELPRLSLDSRERATRNSSVDPKSSKLSESFSESCSSSSKKRPPSVVAKLMGLETLPGSPLGRDIHQFGLNKTNISDQNDDPFSRSLREKNLNRAIRFSPSSPRSLGKDPASPRWRNSDFVMKPLSNTRFPVEPAPWKHADRNRVLQKQASMPVKAKPYEAPNFPPTVYSEMERRLNDLEFKHSGKDLRALKQILESMQSKGFLDTEKQQQSTNFAVQRDYERENSATSNHAMSSRTRVQSSSSNQVYQSPIVIMKPAKLVEKAGIPASSLIPIHSLTGIKKIRREKPDDKGTSASNSKRVTKDCSPGNRRAESCTSSFDKKSDSRNVRSSSKKPQQVSKESASKSSGSVSPRLQQKKLEYDKRSRPPTPPDSSKSRKPSNQQLVESTSPGGRRRPKGQKSLQQVDDQLSQASNESRTSSHGICTQSETEASACVEKSTEADGGKSPSVIEAAKAVVSNLMQNKSSPRFSEDGLSANLSLVALEHPSPISVLDASTYRETEPSPVKTQGNVAHDFGDENCEDQWNPAYSFSETTSSFSPEINRKKLQNVEHLVQKLRRLNSSHDEASQDYIASLCENADPTTDHRYISEILLASGLLLRDLGSGLTTFQLHPSGHPINPELFFVLEQTKGSSTTHLLHKEESKVLKNEKLNRKLVFDLVNEILVEKLASVEATTNPLMKSYAKVTKKAVSAQQLLKELCSAIETQQKQATKRSENFLLEEEDDFLKSILAEDVTIRSGNWADFSGEMSGLVLDVERLVFKDLVNEIVHAETSRLQAKSGRRRTLFADQ

SEQ ID NO: 4273 - protein, 261 aa, Arabidopsis thaliana
MWNLASKSIREGFISKGEEAATKPRRATLDRSGDGRKTTKEEKLECPICWESFNVVENVPYVLWCGHTICKYCLLGLQRAIVIKSSALPFQLPFFVACPWCNILSLRLVCNGTIRFPSKNFYLLWMVESMNGSRSEAPSDNKRVASGQRDLRNRCDGVSNTALGDEGLLDNRSWWNGVTRGFFRTGRLHDSVRKSMALVAHLLAKFPLVVIFLLMALYAIPVSAAVLGVYFFVTFALAVPSFLVLYFAFPSLNWLIREIAT

SEQ ID NO: 4274 - protein, 330 aa, Arabidopsis thaliana
MGRPPCCEKIEVKKGPWTPEEDIILVSYIQQHGPGNWRSVPANTGLLRCSKSCRLRWTNYLRPGIKRGNFTQPEEKMIIHLQALLGNRWAAIASYLPQRTDNDIKNYWNTHLKKKLVMMKFQNGIINENKTNLATDISSCNNNNNGCNHNKRTTNKGQWEKKLQTDINMAKQALFQALSLDQPSSLIPPDPDSPKPHHHSTTTYASSTDNISKLLQNWTSSSSSKPNTSSVSNNRSSSPGEGGLFDHHSLFSSNSESGSVDEKLNLMSETSMFKGESKPDIDMEATPTTTTTDDQGSLSLIEKWLFDDQGLVQCDDSQEDLIDVSLEELK

SEQ ID NO: 4275 - protein, 461 aa, Arabidopsis thaliana
MIKMSEKSLLSSKFLFYTITVSTLLFIVSSLVFLQRHDSSFTSSLVRKLILPRTDIKNEEFGLIDTKCDRDRDVLKVFMYDLPSEFHFGILNWHKKGSEIWPNVNNISTIPSYPGGLNRQHSVEYWLTLDLLASETPEIKRPCSSAAIRVKNSNEADIVFVPFFASLSYNRKSKLRGNETSSDDRLLQERLVEFLKSQDEWKRFDGKDHLIVAHHPNSLLYARNFLGSAMFVLSDFGRYSSAIANLEKDIIAPYVHVVKTISNNESASFEKRPVLAYFQGAIYRKDGGTIRQELYNLLKDEKDVHFAFGTVRGNGTKQTGKGMASSKFCLNIAGDTPSSNRLFDAIVSHCVPVIISDQIELPFEDTLDYSGFSVFVHASEAVKKEFLVNILRGITEDQWKKKWGRLKEVAGCFEYRFPSQVGDSVNMIWSAVSHKLSSLQFDVHRKNRYRRSEMFDRNGSS

SEQ ID NO: 4276 - protein, 415 aa, Arabidopsis thaliana
MGSSMEEKVVAVIMVGGPTKGTRFRPLSLNIPKPLFPIAGQPMVHHPISACKRIPNLAQIYLVGFYEEREFALYVSAISNELKVPVRYLREDKPHGSAGGLYHFRNLIMEDSPSHIFLLNCDVCCSFPLPKMLEAHRGYGGIGTLLVIKVSPESASQFGELVADPVTNELLHYTEKPETFVSDRINCGVYVFTPEIFNAIGDVSTQRKDRATLKRVSSFEALQPATRIPTDFVRLDQDILSPLAGKKRLYTYETMDFWEQIKSPGMSLRCSGLYLSQFRLTSPQLLASGDGTRSAIVIGDVYIHPSAKVHPTAKIGPNVSISANARVGPGVRLMSCIILDDVEIMENAVVTNAIVGWKSSIGRWSRVQAEGVYNSKLGVTILGDSVAVEDEVVVTSSIVLPNKTLNVSVQDEIIL

SEQ ID NO: 4277 - protein, 131 aa, Arabidopsis thaliana
MGKRRFQKAKETSSVAEASSPTESQATRRRRGRPRKNLENPEDFKKEESEEDEDYEEYEDEEEEDEEAEVVINREKLKKKVRSSSGSMEKEQKMKHEELEEEEKPEMTVKVVVPPPSSRRSRRKSTPVKSW

SEQ ID NO: 4278 - protein, 309 aa, Arabidopsis thaliana
MDMRSHEMIERRREDNGNNNGGVVISNIISTNIDDNCNGNNNNTRVSCNSQTLDHHQSKSPSSFSISAAAKPTVRYRECLKNHAASVGGSVHDGCGEFMPSGEEGTIEALRCAACDCHRNFHRKEMDGVGSSDLISHHRHHHYHHNQYGGGGGRRPPPPNMMLNPLMLPPPPNYQPIHHHKYGMSPPGGGGMVTPMSVAYGGGGGGAESSSEDLNLYGQSSGEGAGAAAGQMAFSMSSSKKRFRTKFTTDQKERMMDFAEKLGWRMNKQDEEELKRFCGEIGVKRQVFKVWMHNNKNNAKKPPTPTTTL

SEQ ID NO: 4279 - protein, 322 aa, Arabidopsis thaliana
MTTEKSKILVIGGTGYMGEFIVEGSAKAGNPTFALVREASLSDPVKSKTIQSFKDLGVTILHGDLNDHESLVKAIKQVDVVISTIGHKQIFDQTKIISAIKEAGNVKRFLPAEFGIDVERTSAVEPAKSLFAGKVQIRRAIEAEGIPYTYVVSNCSAGFYLRTLLQFESGLISHTRDKAIIFGDKNVPPRDKVTILGDGNAKVVINKEEDVAAYMIKAVDDLRTLNKTLYISPPNNILSMNEMVTLWEKKIGKSLEKTHISEEQILKSIQVPIDVFKSINHAVFVKGDQTSFTIEPWFGEEASVLYPDVKYTSIDEYLSQFT

SEQ ID NO: 4280 - protein, 435 aa, Arabidopsis thaliana
MRKELCRNFQRGSCRYGENCRFLHPQQAKPNNPFGFGTQNQQQQQQQQQQNSSNPFGFGVQSGGSSRPNQFQNTWSRTASTPTGGGAAASTQQTGKQTQPADHKCTDPAACKRVMQDDFKNERPMWKLTCYGHWKYFPCDVTGDISYEELRAVAYEEAKRGIPLQSIVERERNLQNSKIAEFENFLRNPYKGSVTANQSPFAATTPSIFPQSSQINSPSPAFSGFNQQTAFSNTNAGGLSSSGPPNAFASFNQQTTFPNTNAGGVSSSGPPNPFASFTQQSNNQQTAFSNTNAGGLSSSGPPNAFASFNKQPNAFSVNTPQPVPSGPSGFQTNPSTTFKPASFGPGPGFATTPQNNNIFGQSTPTPATNTSQNNQTAFNFNVPVASFTAPAINTTNTSSGTELQIGGDPVDSSIWLKEKWNPGEIPEQAPPDAFV

SEQ ID NO: 4281 - protein, 173 aa, Arabidopsis thaliana
MNNKTEMGSSTSGNCSSVSTTGLANSGSESDLRQRDLIDERKRKRKQSNRESARRSRMRKQKHLDDLTAQVTHLRKENAQIVAGIAVTTQHYVTIEAENDILRAQVLELNHRLQSLNEIVDFVESSSSGFGMETGQGLFDGGLFDGVMNPMNLGFYNQPIMASASTAGDVFNC

SEQ ID NO: 4282 - protein, 540 aa, Arabidopsis thaliana
MNREMTSSFLLLTFAICKLIIAVGLNVGPSELLRIGAIDVDGHFTVHPSDLASVSSDFGMLKSPEEPLAVLHPSSAEDVARLVRTAYGSATAFPVSARGHGHSINGQAAAGRNGVVVEMNHGVTGTPKPLVRPDEMYVDVWGGELWVDVLKKTLEHGLAPKSWTDYLYLTVGGTLSNAGISGQAFHHGPQISNVLELDVVTGKGEVMRCSEEENTRLFHGVLGGLGQFGIITRARISLEPAPQRVRWIRVLYSSFKVFTEDQEYLISMHGQLKFDYVEGFVIVDEGLVNNWRSSFFSPRNPVKISSVSSNGSVLYCLEITKNYHDSDSEIVDQEVEILMKKLNFIPTSVFTTDLQYVDFLDRVHKAELKLRSKNLWEVPHPWLNLFVPKSRISDFDKGVFKGILGNKTSGPILIYPMNKDKWDERSSAVTPDEEVFYLVALLRSALTDGEETQKLEYLKDQNRRILEFCEQAKINVKQYLPHHATQEEWVAHFGDKWDRFRSLKAEFDPRHILATGQRIFQNPSLSLFPPSSSSSSAASW

SEQ ID NO: 4283 - protein, 136 aa, Arabidopsis thaliana
MARTKQTARKSHGGKAPRTLLATKAARKSAPTTGGVKKPHRYRPGTVALREIRKYQKSTELLIRKLPFQRLVREIAQDYKTDLRFQSHAVLALQEAAEAYLVGLFEDTNLCAIHAKRVTIMPKDVQLARRIRGERA

SEQ ID NO: 4284 - protein, 589 aa, Arabidopsis thaliana
MEMGRRDLMRRGTTNRFSNKQQSGSGFSTKSKKGMLKKLGFADEKLKQEMSYDTLPSPDLENEVSKKKSKLPKKNLKDTNGVDHASVPRKLRSAMKKRNLESVSKLSSVSKRLNRFKTGTESSVKKESQEMEAKAIVTESMMISKDEKEVAETLYGLAGMFTETDSLGKKTSNEKETSKVVDSILVVEDDYTKTESLTPVVSVLSSAKTKQIDAMPLEQSDKQFNTTGMVDFIDRLKQSSSVKVTDAHARVNETKVTTSNGLALWPGLSSTTVHSGAQVLSKPSSTKLPPWMGQAVSPSNTASLLNCEPLRVQPRKLKRCASHIYISRLIKVLQTSKSSLATLNQNEQRYSEMSERRLPDSVITINDFKAIVSPPKRYQNPHLLDMHRAHNPKPVQEDMTKLALELYGPHTSQKQSFDFLSLSSAGAAQSHFPLPNSFPQYQISAAYNSQLSPATSSHQVQQLSPYLASRFQTAYNANQQQQQQLQKRLWAAQYRPTNGNTMQSNQYSKPNLSLNLTSIQQPLQVSSSPRYNHNVSQQQHRLMTAAAAMSMSHQHNNPSRAVMNRQEHHFPLIYEDTRTPLQLLCNEQS

SEQ ID NO: 4285 - protein, 69 aa, Arabidopsis thaliana
MGGGGHGGGITYKGVTVHTPKTWHTVTGKGLCAVMWFWILYRAKQDGPVVMGWRHPWDGHGDHGHGDHH

SEQ ID NO: 4286 - protein, 492 aa, Arabidopsis thaliana
MQFSCDPDQEGDELPQYEHIYQNDFSYRKHKKQKEEDISICECKFDFGDPDSACGERCLNVITNTECTPGYCPCGVYCKNQKFQKCEYAKTKLIKCEGRGWGLVALEEIKAGQFIMEYCGEVISWKEAKKRAQTYETHGVKDAYIISLNASEAIDATKKGSLARFINHSCRPNCETRKWNVLGEVRVGIFAKESISPRTELAYDYNFEWYGGAKVRCLCGAVACSGFLGAKSRGFQEDTYVWEDGDDRYSVDKIPVYDSAEDELTSEPSKNGESNTNEEKEKDISTENHLESTALNIQQQSDSTPTPMEEDVVTETVKTETSEDMKLLSQNSQEDSSPKTAIVSRVHGNISKIKSESLPKKRGRPFSGGKTKNVAQKHVDIANVVQLLATKEAQDEVLKYEEVKKEAAVRLSSLYDEIRPAIEEHERDSQDSVATSVAEKWIQASCNKLKAEFDLYSSVIKNIASTPIKPQDTKTKVAEAGNEDHIKLLEAK

SEQ ID NO: 4287 - protein, 1191 aa, Arabidopsis thaliana
MGRKKPSSSRGGDDEQPPAASSLVGAESKKKAVQSDEEDKYSINTEEEKVVITGKKKSNKKVTQKHDDDDDFTEAVPENGFVGKKKKSKGKNRGGSVSFALLSGKEETDDNESNGDKDDEPVISFTGKKNASNKGKKGFAVSAFDALGGDKDDEEVDGDEEQVSPITFSEGTMGDEESLEITFSGKKKGSIVLASLGDDSVADETSQAKTPDTKSVEVIETGKIKKKKKNKNKVARTLEEEDDLDKLLAELGETPAAERPASSTPEVEKVQAQPGPVAPVENAGEKEGEKETVETAAAKKKKKKKEKDKEKKAAAAATSSVEAKEEKQEESVTEPLQPKKKDAKGKAAEKKIPKHVREMQEALARRQEAEERKKKEEEEKLRKEEEERRRQEELEAQAEEAKRKRKEKEKEKLLRKKLEGKLLTAKQKTEAQKREAFKNQLLAAGRGLPVADDVGDATSSKRPIYANKKKPSRQKGNDTSVQVEDEVEPQENHAATLGEVGSEDTEKVDLLESANTGEKSGPADVAQENGVEEDDEWDAKSWDNVDLKIDDKEEEAQPVVKKELKAHDSDHETEKPTAKPAGMSKLTTGAVKAISEVEDAATQTKRAKKGKCLAPSEFIKEGGENLRSIICCIMGHVDSGKTKLLDCIRGTNVQEGEAGGITQQIGATYFPAKNIRERTRELKADAKLKVPGLLVIDTPGHESFTNLRSRGSSLCDLAILVVDIKHGLEPQTIESLNLLRMRNTEFIIALNKVDRLYGWKTCKNAPIVKAMKQQNKDVTNEFNIRLTDIITQFKEQGLNTEIYYKNKEMGETFSIVPTSAKSGEGVPDLLLWLVQWAQKTMVEKLTYVDEVQCTVLEVKVIEGHGTTIDVVLVNGELHEGDQIVVCGLQGPIVTTIRALLTPHPMKELRVKGTYLHHKEIKAAQGIKITAQGLEHAIAGTSLHVVGPDDDIEAMKESAMEDMESVLSRIDKSGEGVYVQTSTLGSLEALLEFLKTPAVNIPVSEGYNEGWSDAREEKEYATILAFDVKVTTEARELADEMGVKIFCADIIYQLFNQFQVYIENIKEEKKKESAGEAVFPCVLQILPNCVFNKRDPIILGVKVHDGILKIGTPICVPGREFTDIGRIASIENNHKPVDYAEKGDEVAIKIVASNREEQKMFGRHFDMEDELVSHISRRSIDILKADYMVSQG

SEQ ID NO: 4288 - protein, 122 aa, Arabidopsis thaliana
MAGAVGTSMLGSLIVFTVILSLQEIYRGKLASSELFTILGGFTSSLLFLFSLTFIGNFQESSGIKSGWGAVILAEIIALIAAGTVHRVCITTCFLFSAGLLYEVNKISGYMLSKTESKSKRH

SEQ ID NO: 4289 - protein, 2136 aa, Arabidopsis thaliana
MLKAFLPGTQEEETLSSLQSGKVDAKMEMDDPEKAMATVAQLIEQLHAKTSSPQDKELTTARLLGIAKGKREARRLIGSYGQAMPLFISMLRNGTTLAKVNVASILCVLCKDKDLRLKVLLGGCIPPLLSVLKSGTMETRKAAAEAIYEVSSAGISNDHIGMKIFITEGVVPTLWDQLSLKGNQDKVVEGYVTGALRNLCGVDDGYWRLTLEGSGVDIVVSLLSSDNPNSQANAASLLARLVLSFCDSIQKILNSGVVKSLIQLLEQKNDINVRASAADALEALSANSDEAKKCVKDAGGVHALIEAIVAPSKECMQGKHGQSLQEHATGALANVFGGMRHLIIYLGQVSQSPRLTEPIGDVIGALAYALMIFKQPESSENIFDPSVIESILVKLLKPRDTKLIQERILEAMASLYGNSSLSCYLDDAEAKRVLIALITMASADVRERLIICLSGLCHDKVGIWEAIGKREGIQLFISFLGLSSEQHQEYAVEMLKILTAQVDDSKWAVTAAGGIPPLVQLLETGSQKAKEDAACILWNLCCHSEEIRDCVERAGGIPAFLWLLKTGGPNSQETSAKTLVKLVHTADPATINQLLALLLGDDPTSKIQVIEVLGHVLSKASQEDLVHRGCAANKGLRSLVESLTSSREETKEHTASVLADLFSSRQDICGHLATDDIINPWIKLLTNNTQNVAKQVARALDALSRPVKNNNNKKKSYIAEGDIKSLIKLAKNSSIESAENAVSALANLLSDPDIAAEALAEDVVSAFTRILADGSPEGKRNASRALHQLLKNFPVCDVLKGSAQCRFAILSLVDSLKSIDVDSADAFNILEVVALLAKTKSGVNFSYPPWIALAEVPSSLETLVQCLAEGHTLVQDKAIEVLSRLCSDQQFLLSELIVSRPKSMLVLADRIVNASSLEVRVGSTALLLCAAKEKKQLITETLDQSGFLKLLLHALVDMIKHNSTSFSLETEVQTPKGFLEKNVFQDTGSFYFPDPAKILGGTVALWLLCILTSVDAKSKVIVMEAGGLEVLVGKLARYTSSAQAEFEDTEGIWISALLLAIMFQDDNVSFSSTTMRIIPTLAVLLGSDELIDRYFAAHAMASLVCTRNRGINLTIANSGAVSGIINLLGYVESEILNLVALANEFSLVKEPDQVILQHLFEIEDVRLGSTARKSIPLLVDLLRPIPDRPGAPQFAVQILIRIADGSDTNKLLMAEAGAVEALTKYLSLSPQDSTEYAISELLRVLFSNHELRQNEMALSSLNQLIAVLRLGSRSARYSAAGALNELFDAENIRNSEIACQAVQPLMDILGSVSESEQEVALSALIKLSSGNTSNTALLIDVEGSLLENVIKILSSATASEELKINAARLCSVVFSNKNIRTSASASGCMKPLITLMQSERSAAVEAAVFAIKILLDDEQHLELAAAHNIQELLVGLVSGKNYVIIEASLSALIKLGKDRVPRKLDMVEAGIIERCLELLPGASSSLCSAVVELFRILTNSGVIARRPDVAKTVEPLFAVLLRSDLTLWGQHSALQALVNILEKQQTLEAFSFTPSEAIVPLISFLESSSQAIQQLGAELLSHFLTMEDFQQDITTQSAVVPLVRLAGIGILSLQETAIKALEKISASWPKAVLDAEGIFELSKVILQEDPQPPLDLWESAAFVLSNILQYDAECFFRVELPVLVKLLFSTIESTVLLALKALMLHEKNDASSTVQMAELGAIDALLDLLRSHQCEEESGSLLEVIFNNPRVRELKLCKYAIAPLSQYLLDPHTRSEPGRLLAALALGDLSQHEGLSRSSGSVSACRALISVLEEQPTEEMKVVAICALQNFVMNSRTNRRAVAEAGGVLLIQELLLSCNPEVSGQAALMVKFLFSNHTLQEYVSNELIRSLTAALERGLWSTATINIEVLRTLNVIFSNFPKLRASEAATFCIPHLVGALKSGVEDVQGLVLDILYLLRHSWTNMSIDVAKSQAMIAAEAIPVLQMLMKTCPPRFHDKADSLLHCLPGCLTVNVMRANNLKQSMATTNAFCQLTIGNCPPRQTKVVSNSTTPEWKEGFTWAFDVPPKGQKLHIICKSKSTFGKTTLGRVTIQIDKVVTEGEYSGSLSLNHENSKDASSRSLDIEIAWSNRTTDETH

SEQ ID NO: 4290 - protein, 779 aa, Arabidopsis thaliana
MEKRKRESSERSFGESESVSSLSEKDSEIQPESTMESRDDEIQSPTVSLEVETEKEELKDSMKTLAEKLSAALANVSAKDDLVKQHVKVAEEAVAGWEKAENEVVELKEKLEAADDKNRVLEDRVSHLDGALKECVRQLRQARDEQEQRIQDAVIERTQELQSSRTSLENQIFETATKSEELSQMAESVAKENVMLRHELLARCEELEIRTIERDLSTQAAETASKQQLDSIKKVAKLEAECRKFRMLAKSSASFNDHRSTDSHSDGGERMDVSCSDSWASSTLIEKRSLQGTSSSIELDLMGDFLEMERLVALPETPDGNGKSGPESVTEEVVVPSENSLASEIEVLTSRIKELEEKLEKLEAEKHELENEVKCNREEAVVHIENSEVLTSRTKELEEKLEKLEAEKEELKSEVKCNREKAVVHVENSLAAEIEVLTSRTKELEEQLEKLEAEKVELESEVKCNREEAVAQVENSLATEIEVLTCRIKQLEEKLEKLEVEKDELKSEVKCNREVESTLRFELEAIACEKMELENKLEKLEVEKAELQISFDIIKDKYEESQVCLQEIETKLGEIQTEMKLVNELKAEVESQTIAMEADAKTKSAKIESLEEDMRKERFAFDELRRKCEALEEEISLHKENSIKSENKEPKIKQEDIETAAGKLANCQKTIASLGKQLQSLATLEDFLTDTPIIPMAANGVSSSSNSESWKVHKNETFMTRNHPESIKPTKETSPSSSSSTASAAVSMPVSTNRGSSEKNRNGFATVFTRSKDGIHLAI

SEQ ID NO: 4291 - protein, 421 aa, Arabidopsis thaliana
MSQKKLTRTQSSLLRSSPTIRSSIQSLSSITECDDFNETSHHRREQDLEAGEKEEKQRRRKPVKSFGSMNRIKPGLAFTLACLSFLSLSSFLLFFVDEIFTSENLLLGLIFVALALFFASRNMAVINQTVIAIKQIRVRSRIKHKPKPVQWYIGDSKPEPIKEEETRLVVKEGVQFFSNGDFYEGEFNRGKCNGSGVYYYYVNGRYEGDWINGRYDGYGIECWSKGSKYKGQYKQGLRHGFGVYWFYTGDSYSGEWFNGQSHGFGVQTCADGSSFVGEFKFGVKHGLGSYHFRNGDKYAGEYFGDKIHGFGVYHFANGHYYEGAWHEGRKQGYGTYRFRTGDIKSGEWDDGNLVNHLPLDSDPVRRAVQSARERAKNGVNQRRIDEQVIRAVAAANKAATAARVAAVKAVQNQMDGKICDN

SEQ ID NO: 4292 - protein, 1055 aa, Arabidopsis thaliana
MKSASSEQSVERIENGHKKKRNRPQKQNRRSKQSSVPIEDAHVEESLDGRDSSRSKAKDSTSSSKQQRPNTDELEAMRASNVAFNSMPPMRAESGYPRRSASPLLSSPEVSKQLLSKSCPDPRACEQSPGMNGELFQQIEGSSQRKIFSSHWSLDAVTEALEKGEAFKALFRVNAHNRNEAYCKIDGVPTDILINGNVCQSRAVEGDTVVIKLDPLSLWPKMKGFVTESAAKPEGTNSPPEKDDKKARQKNGIDVVEGFEDGFSKNKSSVIGKGAKNGVTPSSPPSLDSCLGSFCEQKGNCSAVDKLCGILSSFPHKRPTGQVVAVVEKSLVRDSIVGLLDVKGWIHYKESDPKRCKSPLSLSDDEYVQLMPADPRFPKLIVPFHVLPGSIRARLENLDPNLEAELVAAQIVDWGEGSPFPVAQITHLFGRGSELEPQINAILYQNSVCDSDFSPGSLTSLPRVPWEVPEEEVQRRKDLRDLCVLTIDPSTATDLDDALSVQSLPGGFFRVGVHIADVSYFVLPETALDTEARFRSTSVYLMQRKISMLPPLLSENVGSLSPGADRLAFSILWDLNREGDVIDRWIGRTIIRSCCKLSYDHAQDIIDGKSDVAENGWPALHGSFKWCDVTRSVKQLSEISTTLRQKRFRNGALQLENSKPVFLFDEHGVPYDFVTCSRKGSNFLVEEFMLLANMTAAEVISQAYRASSLLRRHPEPNTRKLKEFEGFCSKHGMDLDISSSGQLQDSLEKITGNLKDDSVFVDILNNYAIKPMQLASYFCTGNLKDSVAEWGHYALAVPLYTHFTSPLRRYPDIVVHRALAAALEAEELYSKQKQTAIDEGRSCFTGIHFNKDAAESIEGKEALSVAALKHGVPSTEILSDVAAYCNERKLAARKVRDACDKLYTWFVLKQKEIFPCEARVMNLGSRFMTVYISKLGIERRIYYDQIEGLCADWLEATSTLIVDKLYSKRGGRGFFKPMKEAVYLVSPCEVCVAKCSALSVHDTESPEAVSIDEVAPAVFPLTIQLFSTIPVVLHAVGGDDGPLDIGARLYMSSYY

SEQ ID NO: 4293 - protein, 334 aa, Arabidopsis thaliana
MAAAMNLYTCSRSFQDSGGELMDALVPFIKSVSDSPSSSSAASASAFLHPSAFSLPPLPGYYPDSTFLTQPFSYGSDLQQTGSLIGLNNLSSSQIHQIQSQIHHPLPPTHHNNNNSFSNLLSPKPLLMKQSGVAGSCFAYGSGVPSKPTKLYRGVRQRHWGKWVAEIRLPRNRTRLWLGTFDTAEEAALAYDKAAYKLRGDFARLNFPNLRHNGSHIGGDFGEYKPLHSSVDAKLEAICKSMAETQKQDKSTKSSKKREKKVSSPDLSEKVKAEENSVSIGGSPPVTEFEESTAGSSPLSDLTFADPEEPPQWNETFSLEKYPSYEIDWDSILA

SEQ ID NO: 4294 - protein, 287 aa, Arabidopsis thaliana
MSQTSYYRSPFGDTTYTKVFVGGLAWETPTDEMRRYFEQFGEILEAVIITDKNTGKSKGYGFVTFRESDSATRAVADPNPVIDGRKANCNIASFGRPRPSPPRGRGQTGSPSQYQSGGPSTYTGMAAPLPPAAAPQLMYPSYGYTYNPDQFGYHQALYNTQLQQAQYYQQQQQLYGGGATSPSSSGATIMPSPYYYGYSLQAPRVPYQHHHHLPQPYNPQQHHHQRFSSPSFLVYPSNSSFAPPLQGVLSSSTESEAVPQQVPAAEGEATTTAPEITTSNTKEPISS

SEQ ID NO: 4295 - protein, 325 aa, Arabidopsis thaliana
MTSGTRMPTWRERENNKRRERRRRAIAAKIFTGLRMYGNYELPKHCDNNEVLKALCNEAGWIVEPDGTTYRKGCSRPVERMEIGGGSATASPCSSYQPSPCASYNPSPGSSNFMSPASSSFANLTSGDGQSLIPWLKHLSTTSSSSASSSSRLPNYLYIPGGSISAPVTPPLSSPTARTPRMNTDWQQLNNSFFVSSTPPSPTRQIIPDSEWFSGIQLAQSVPASPTFSLVSQNPFGFKEEAASAAGGGGGSRMWTPGQSGTCSPAIPPGADQTADVPMSEAVAPPEFAFGSNTNGLVKAWEGERIHEESGSDDLELTLGNSSTR

SEQ ID NO: 4296 - protein, 359 aa, Arabidopsis thaliana
MNFHQVLFLLLLIFLVDLSDYGVLADKTNDGYKNATKCNIYQGRWIYDNSSNPLYGTSTCPFIGLDCQKFGRPDKNYLHYRWQPTGCDIPRFNGRDFLTRFKGKKILFVGDSLSNNMWVSLSCMLHAAVPNAKYTFQLNKGLSTFTIPEYGISVNFLKNGFLVDLVSDKTRGLILKLDSISRGNQWLGSDVAIFNTFHWWSHTGRAKTWDYFQTGDKIVKEMNRMEAFKIALTTWSKWIDHNIDPSKTRVFYQGVSPVHLNGGEWGKPGKTCLGETVPVQGPSYPGRPNEGEAIVKSVIGRMAKPVELLDVTAMTEMRKDGHPSIYAGGGDRLNDCSHWCLPGVPDAWNQLLYTALLSH

SEQ ID NO: 4297 - protein, 468 aa, Arabidopsis thaliana
MGSRYASHQLSNGLFVSGRPEQPKEKPPTMSSVAMPYTGGDIKKSGELGKMFDIPTDGTKSRKSGPITGGSSRSGAQSGPVPNATGRMSGNLASAGSNSMKKTNSGPLSKHGEPLKKSSGPQSGGVTRQNSGPIPILPTTGLITSGPITSGPLNSSGAPRKISGPLDYSGSMKTHMPSVVHNQAVTTLAPEDDFSCMKSFPKPVLWLVILIFVMGFLAGGFILGAVHNAILLIVVAVLFTVVAALFIWNISCERRGITDFIARYPDADLRTAKNGQYVKVTGVVTCGNVPLESSFHRVPRCVYTSTCLYEYRGWGSKPANASHRRFTWGLRSAERHVVDFYISDFQSGLRALVKTGNGAKVTPLVDDSVVIDFKPGNEQASPDFVRWLGKKNLTNDDRIMRLKEGYIKEGSTVSVIGVVQRNDNVLMIVPTTEPLAAGWQWSKCTFPASLEGIVLRCEDSSNVDAIPV

SEQ ID NO: 4298 - protein, 399 aa, Arabidopsis thaliana
MHSTGKRNFLAVIRLLFTSSSLVRKAGCRNLISATFTTRCSTLCLNESEECIEDSDLSSRRKKFDYVGEVGEKEKVRDITSSPLQVLRRWGCDDDEISKLFTRRPALQRANVAQLEFKLSLLKPLGITSSDLVKILNCRPRFFSCRLVLDERINYFMEILGSKEVLRRVIIRNPSLMLYDLDDKIKPAIEYYKGLGFSQQDLVAMLISRPTLIPRTNFNNEKFEYIEKTGVTRESKMFKYVAVIIGVSRMETIEEKVRNLEKFGFSEEEIWHLYGKCPILLSLSVEKVQRNMTFVIASMKLPAHSVVKHPCLLLLNLESRLKPRADLVKRVLEMRLKPLIKEVSIFRAVRMSEKRFLKVYVMCHPQDIATELMEFYEKSKNMKRLAEKSKKYIRKGFPF

SEQ ID NO: 4299 - protein, 379 aa, Arabidopsis thaliana
MASTLFSRTFLAASHRLITPSLPQKIFNPATFLSRSLHSQLGSASTAYKSTTWARRAMASTGVETKAGYSTSSVSTSEPVVSVDWLHANLREPDLKILDASWYMPDEQRNPIQEYQVAHIPRALFFDLDGISDRKTSLPHMLPTEEAFAAGCSALGIDNKDEVVVYDGKGIFSAARVWWMFRVFGHEKVWVLDGGLPRWRASGYDVESSASGDAILKASAASEAIEKIYQGQTVSPITFQTKFQPHLVWTLDQVKNNMEDPTYQHIDARSKARFDGTAPEPRKGIRSGHIPGSKCIPFPQMFDSCNTLLPAEELKKRFDQEDISLDKPIMASCGTGVTACILAMGLHRLGKTDVPIYDGSWTEWATQPDLPIESVESSS

SEQ ID NO: 4300 - protein, 836 aa, Arabidopsis thaliana
MIRGRTAKVIPRNVIFTLSRSSISESPLISPSRINPKLAGSFSFNIRLLSYFTVRNGFCPDCSVPRDPNFVGLTTQCRSIVRRFCSEKIGSSESSGWTEEVEYLDESGSVLHSGKGIRSVEPGLDDHVMVGGLKKPYMNASSVAKIVEVVQRWKWGPELETQLDKLQFVPNMVHITQSLKIVKEVDAALSLFRWAKKQPWYLPSDECYVVLFDGLNQGRDFVGIQSLFEEMVQDSSSHGDLSFNAYNQVIQYLAKAEKLEVAFCCFKKAQESGCKIDTQTYNNLMMLFLNKGLPYKAFEIYESMEKTDSLLDGSTYELIIPSLAKSGRLDAAFKLFQQMKERKLRPSFSVFSSLVDSMGKAGRLDTSMKVYMEMQGFGHRPSATMFVSLIDSYAKAGKLDTALRLWDEMKKSGFRPNFGLYTMIIESHAKSGKLEVAMTVFKDMEKAGFLPTPSTYSCLLEMHAGSGQVDSAMKIYNSMTNAGLRPGLSSYISLLTLLANKRLVDVAGKILLEMKAMGYSVDVCASDVLMIYIKDASVDLALKWLRFMGSSGIKTNNFIIRQLFESCMKNGLYDSARPLLETLVHSAGKVDLVLYTSILAHLVRCQDEDKERQLMSILSATKHKAHAFMCGLFTGPEQRKQPVLTFVREFYQGIDYELEEGAARYFVNVLLNYLVLMGQINRARCVWKVAYENKLFPKAIVFDQHIAWSLDVRNLSVGAALIAVVHTLHRFRKRMLYYGVVPRRIKLVTGPTLKIVIAQMLSSVESPFEVSKVVLRAPGELVMEWFKKPIVQQFLLNEIPSRSDILMHKMNVMFPSSAPELRSMSPPKPLMSSKAF

SEQ ID NO: 4301 - protein, 772 aa, Arabidopsis thaliana
MAEEHFDVLTKSGEKTGVSKPRGEVHRDGDYHRAVHVWIFVETTQQLLLQLRSDDKDSWPGQWDISSAGHISAGDTSLLSAQRELEEELGVKLPKDAFEKIFVFLQECVTNDGKFINNEFNDVYLVTILHPIPLEAFTLQKEEVSAVKYVPYEEYRNFLSKEDPAYVPYDVNGEYGKLFDIIRQRCQVNTEARSLSLQKQLQRYSPVTLEAKLTELSEADQKALGLIVKAAKIMDDIFYEQVWNSNPALRDWLKDHANASKLDKLKWDYFTINKSPWSSLDENEAFLSTADSAVKLLPGATKAIAGWKGLEYRAAFPVTKPPGANFYPPDMDKMEFTLWLNGLTEEQKHAATGFFSVIKRRSEANLDASDHLASSTKKLPDSNSDLYSIPYSEIYRPFLKKASEFLQKAGDLVSSPSLKKLLHSKAEAFLSNEYYESDIAWMDLDSKLDITIGPYETYEDEIFGYKATFETFIGIRDDKATADLKLFGDNLKLLEDNLPLESVYKSTDVSAAPIRVIQLIYNSGDVKGPQTVAYNLPNDEKIVKDRGTSMVMLKNVQEAKFEHILKPIAEITISKEQRGLVDFDSFFTHTICHECCHGIGPHTITLPGGQTSTVRKELQEVHSAMEEAKADIVGLWALKFLITKGLLSKSMVESMYVSFLAGCFRSIRFGLTEAHGKGQALQFNYLYEKGAFVFHEDSTFSVDFAKIEGAVESLSHEILTIQGKGDKNAATLLLNKYCTITGPLKTALENLERVKVPVDISPTFPLAEALMN

SEQ ID NO: 4302 - protein, 245 aa, Arabidopsis thaliana
MAAAAMHTSAEFINLKPNMWKKNPVRASGSCCLGSSSGDEISRKRKLPILLFDVMDTIVRDPFYQDVPAFFGMPMKQLLECKHPMVWIEFEKGLIDEEELARNFFIDGRDFDLEGLKECMRSGYSYLDGMQELLQTLAADDFEIHAFTNYPIWYNIIEDKLKLSAYLSWTFCSCIAGKRKPDPEFYLEVVGHLGVEPCDCIFIDDRPTNVKCAIEIGMGGLCFENADSLAKDLSDLGINVSVPKL

SEQ ID NO: 4303 - protein, 333 aa, Arabidopsis thaliana [sequence omitted]

SEQ ID NO: 4304 - protein, 647 aa, Arabidopsis thaliana
MGKGWFMVEKARRCLRTVFFMVAMLVSLLVSSLPVLVAIGDVLVPTFLLSSFTCLTCYGFKEHLSRYAFKSSLTDIPLVSLVRSFLVICVYSLSDAPALSHGPYLGTVSLCSVVSVVLLSVKACVFTANSQLNDQASSSPSRQRLHLKKSWGMPVLFLSSVVFALGHMVVAYRTSCRARRKLLYHRVDPEAVLSCKSVFSGYQKVPRSPIPLVGKASKVDGEARRKLHPSVSNDDGELPARLLADLDSLFITVRGLTVHYKICTPASPRHSISSSVEANSMLNMPEAMVGRLKLDRNILSMVTRNKLNHHHHRSYSSLFNNSSSLHDPLLDGLPTSPRLFKDIQEESCREDGINVSNFGATEQQDVGGNGQFGVVLVHGFGGGVFSWRHVMSSLAHQLGCVVTAFDRPGWGLTARPHKKDLEEREMPNPYTLDNQVDMLLAFCHEMGFASVVLVGHDDGGLLALKAAQRLLETKDPIKVKGVVLLNVSLTREVVPAFARILLHTSLGKKHLVRPLLRTEIAQVVNRRAWYDPAKMTTDVLRLYKAPLHVEGWDEALHEIGRLSSEMVLPTQNALSLLKAVENLPVLVVAGAEDALVPLKSSQVMASKLENSRLVAISGCGHLPHEECPKALLAAMCPFISRLVFSED

SEQ ID NO: 4305 - protein, 353 aa, Arabidopsis thaliana
MSQKRNLPSWMSSRDPEITPSKSHCKKPKDEGPTEEHNSRNAPSNKSEHAEPSSNTTEFSKLMEGVVFVLSGFVNPERSTLRSQALTMGATYQPDWNAGSTLLICAFPNTPKFRQVETNGGTIISKEWITECYAQKKLVDIEQYLMHAGKPWRKSSSPQDANREKREHLSKKPEKQVEKKTETRGTPSTSSKNRSACNLVKEPFFVTEVKKWARDDLSQTISWLESQEEKPEPGEIKRIAAEGVLTCLQDAIDSLEQKQDIGSVTELWSFVPRVVKELGKMESSSKKENSTASKEEVCKQAKSWKKIYEAELAKPGEDESTSRVACGYDSDMTVEMTEEEIELAYRNVSLECL

SEQ ID NO: 4306 - protein, 480 aa, Arabidopsis thaliana
MFIGIAYLGGDRQMDELPDHLVWDILSKLHTTDDRNSLSLSCKRFFSLDNEQRYSLRIGCGLVPASDALLSLCRRFPNLSKVEIIYSGWMSKLGKQVDDQGLLVLTTNCHSLTDLTLSFCTFITDVGIGHLSSCPELSSLKLNFAPRITGCGVLSLAVGCKKLRRLHLIRCLNVASVEWLEYFGKLETLEELCIKNCRAIGEGDLIKLRNSWRKLTSLQFEVDANYRYMKVYDQLDVERWPKQLVPCDSLVELSLGNCIIAPGRGLACVLRNCKNLEKLHLDMCTGVSDSDIIALVQKASHLRSISLRVPSDFTLPLLNNITLRLTDESLSAIAQHCSKLESFKISFSDGEFPSLFSFTLQGIITLIQKCPVRELSLDHVCVFNDMGMEALCSAQKLEILELVHCQEVSDEGLILVSQFPSLNVLKLSKCLGVTDDGMRPLVGSHKLELLVVEDCPQVSRRGVHGAATSVSFKQDLSWMY

SEQ ID NO: 4307 - protein, 427 aa, Arabidopsis thaliana
MCLLRHLLPIWVLLGFFFFSTATKSQESSVVYVSGASPEIPISQASPRMGAQSPGPPIVKVVLRQDLNKKILIALIVSSSLLCVTVMFLVYLLLWRYRNMKNSFTGIKRKSDSVKSVTTKPTVHKIDSVRKGTIPVYEYQLLESATNKFSDSNVLSRGGRGCLYRACLDEKSSVTVKKLDGGGETDIEKQFETEVDWLAKIRHQNIVSLLGFCVYRQTSCIVYELMQNGSLESQLHGPSQGSGLTWQLRMKIAVDIARGLEYLHEHCHPPVVHRDLKSSSILLDSDFNAKISDFGFATVLTTQNKNLIHKASEDLLDGKVTDKNDVYSFGVILLELLLGKKSVEKPSSEPESIVTWAVPKLSDRANLPNILDPAIKGTMDLKHLYQVAAVAVLCVQPEPSYRPLITDVLHSLIPLLPVELGGSLRIL

SEQ ID NO: 4308 - protein, 286 aa, Arabidopsis thaliana
MSLFLKDDSIQIREVWNDNLQEEMDLIRDVVDDFPYVAMDTEFPGIVVRPVGTFKSNADYHYETLKTNVNILKMIQLGLTFSNEQGNLPTCGTDKYCIWQFNFREFDLDSDIFALDSIELLKQSGIDLAKNTLDGIDSKRFAELLMSSGIVLNENVHWVTFHSGYDFGYLLKLLTCQNLPDSQTDFFKLINVYFPTVYDIKHLMKFCNSLHGGLNKLAELLEVERVGICHQAGSDSLLTSCTFRKLKENFFVGPLHKYSGVLYGLGVENEANGKNVSYRMDMVAWA

SEQ ID NO: 4309 - protein, 214 aa, Arabidopsis thaliana
MIRGRGSWSGLSTRLKLYRTRRFCTKGENKLEKTESSVAHHSETESSVSRYDETYKKLDKLDFVTAAKILFTEPPKKNKFGFDWHVVQFIIVCLPSVAVYLVAQYARRKMKIMDAELGEKKRKEEEKKEKEEAEQKALQVEAATKSHEELMEMRQRLGKIEETIKEIVLETKKPSGNAPTKTQEDQSTKLSPKEVSQPEKEHKGNVQKPGDGPH

SEQ ID NO: 4310 - protein, 247 aa, Arabidopsis thaliana
MDCKKFIQMVEEKKRRVLEKQEAPLKWEQKLEAAANAKADTETKVKRSKGPKRKQRAASESSSESDSSSEVRRKSRRSHNKHRRHAHSDSDDSDRRKEKKSRRQKRRSLSPSDDSTGDYESGSEDELRMKIKHHRRHKWHSSRKTCDDDSTEDVRRKHLKHHRRSEVVTSSDSEEESGRRRRGKYHRHNRGSASSSGSEEDSGKSMKRRQHKRHRLAESSSEEDGAMRRTRHHKHGRDSASESDGRR

SEQ ID NO: 4311 - protein, 62 aa, Arabidopsis thaliana
MLWRLRGLFKLYGHLGFLVLWLLVQPLLDQPVITWFIMSLIIHLLFGLLVPFFKEGKYLASA

SEQ ID NO: 4312 - protein, 348 aa, Arabidopsis thaliana
MISVSRFLSPQFYAIPRSFVKMSASATQTAGEVSMGIKPPSHPTYDLKAVIKLALAEDAGHTGDVTCMATIPFDMEVEAYFLAKEDGIVAGVALADMIFEHVDPSLKVEWMRKDGDYVHKGLKFGKVSGNAHKIVVAERVLLNFMQRMSGIATLTKLMADAASPACILETRKTAPGLRLVDKWAVLIGGGRNHRMGLFDMVMIKDNHISAAGGIVNAVKSVDEYLKQKNLEMDVEVETRTLEEVKEVLEYASGSETRLTRIMLDNMVVPLENGDVDVTMLKDAVELINGRFETEASGNVTLETVHKIGQSGVTFISSGALTHSVKALDISLKIDTELALEVGRRTKRA

SEQ ID NO: 4313 - protein, 744 aa, Arabidopsis thaliana
MSDALSAIPAAVHRNLSDKLYEKRKNAALELENIVKNLTSSGDHDKISKVIEMLIKEFAKSPQANHRKGGLIGLAAVTVGLSTEAAQYLEQIVPPVINSFSDQDSRVRYYACEALYNIAKVVRGDFIIFFNKIFDALCKLSADSDANVQSAAHLLDRLVKQDIVTESDQFSIEEFIPLLKERMNVLNPYVRQFLVGWITVLDSVPDIDMLGFLPDFLDGLFNMLSDSSHEIRQQADSALSEFLQEIKNSPSVDYGRMAEILVQRAASPDEFTRLTAITWINEFVKLGGDQLVRYYADILGAILPCISDKEEKIRVVARETNEELRSIHVEPSDGFDVGAILSVARRQLSSEFEATRIEALNWISTLLNKHRTEVLCFLNDIFDTLLKALSDSSDDVVLLVLEVHAGVAKDPQHFRQLIVFLVHNFRADNSLLERRGALIVRRMCVLLDAERVYRELSTILEGEDNLDFASTMVQALNLILLTSPELSKLRELLKGSLVNREGKELFVALYTSWCHSPMAIISLCLLAQAYQHASVVIQSLVEEDINVKFLVQLDKLIRLLETPIFTYLRLQLLEPGRYTWLLKTLYGLLMLLPQQSAAFKILRTRLKTVPTYSFSTGNQIGRATSGVPFSQYKHQNEDGDLEDDNINSSHQGINFAVRLQQFENVQNLHRGQARTRVNYSYHSSSSSTSKEVRRSEEQQQQQQQQQQQQQQQQRPPPSSTSSSVADNNRPPSRTSRKGPGQLQL

SEQ ID NO: 4314 - protein, 613 aa, Arabidopsis thaliana
MAIDCLVLGAGQEIGKSCVVVTINGKKIMFDCGMHMGCDDHNRYPNFSLISKSGDFDNAISCIIITHFHMDHVGALPYFTEVCGYNGPIYMSYPTKALSPLMLEDYRRVMVDRRGEEELFTTTHIANCMKKVIAIDLKQTIQVDEDLQIRAYYAGHVLGAVMVYAKMGDAAIVYTGDYNMTTDRHLGAAKIDRLQLDLLISESTYATTIRGSKYPREREFLQAVHKCVAGGGKALIPSFALGRAQELCMLLDDYWERMNIKVPIYFSSGLTIQANMYYKMLISWTSQNVKEKHNTHNPFDFKNVKDFDRSLIHAPGPCVLFATPGMLCAGFSLEVFKHWAPSPLNLVALPGYSVAGTVGHKLMAGKPTTVDLYNGTKVDVRCKVHQVAFSPHTDAKGIMDLTKFLSPKNVVLVHGEKPSMMILKEKITSELDIPCFVPANGETVSFASTTYIKANASDMFLKSCSNPNFKFSNSTQLRVTDHRTADGVLVIEKSKKAKIVHQDEISEVLHEKNHVVSLAHCCPVKVKGESEDDDVDLIKQLSAKILKTVSGAQIHESENCLQVASFKGSLCLKDKCMHRSSSSSSEAVFLCCNWSIADLELGWEIINAIKLNH

SEQ ID NO: 4315 - protein, 283 aa, Arabidopsis thaliana
MDDDGFRNWGYYEPAAASSFKGNLGLQLMSTIDRNTKPFLPGRESNLMIGSNGSYHSREQDMNYSWINQPKDNKFFNMLPISTPSYSNVLSETSGSNSIQMIHQPVLNSSRFEENPIPPPAPCEEQTGKKRKMRGSIATPTVPKAKKMRKPKEERDVTNNNVQQQQQRVKPVKKSVDLVINGVSMDISGLPVPVCTCTGTPQQCYRWGCGGWQSACCTTNISVYPLPMSTKRRGARISGRKMSQGAFKKVLEKLSTEGYSFGNAIDLKSHWARHGTNKFVTIR

SEQ ID NO: 4316 - protein, 399 aa, Arabidopsis thaliana
MSLTKSSESVFTEEEEEDSFSGRYTLWIKEALEELPHNFTITDPFISGHPIVFASLGFLKMTGYSREEVIGRNGKVFQGPKTNRRSIMEIREAIREERSVQVSLLNYRKSGSPFWMLFHMCPVFGKDDGKVTNFVAVQVPISGREHHRKKLRNVGDLSSDTSPTFGSCRREVCFGNFVCQDRALPVECDDDEQGLEDWEQCEASESEKLKATEAINNVLSILVHYSELSGRLVCGKRYCLRGVDCLSSSLVISLGRIKQSFVLTNPCLPDMPIIYASDAFLTLTGYKRQEVLGQNCRFLSGVDTDSSVLYEMKECILKGQSCTVQILNYSNRKDKSSFWNLLHISPVRNASGKTAYFVGVQVEASCRNTEIKELRPETRQLSVVGAVRVAVRSSLMVTC

SEQ ID NO: 4317 - protein, 467 aa, Arabidopsis thaliana
MLEDRSPDSCLSTRVFSSSRLSESNWSNSYMYPEDDDKLLGNGKRALEVVGEVRQTKSLKLMGFSIIYDSDSSDYSLSGGEEQADAAIGDGSSSRQEQEQQSDFNDNGGDSSDSHSLINEIGRDNSIDCLIRCSRSDYGSIASLNRNFRSLVKSGEIYRLRRQNGFVEHWVYFSCQLLEWVAFDPVERRWMQLPTMPSSVTFMCADKESLAVGTDLLVLGKDDFSSHVIYRYSLLTNSWSSGMKMNSPRCLFGSASLGEIAIFAGGCDSQGKILDFAEMYNSELQTWITLPRMNKPRKMCSGVFMDGKFYVIGGIGGADSKGLTCGEEYDLETKKWTQIPDLSPPRSRADQADMSPAAEAPPLVAVVNNQLYAADHADMEVRKYDKENKKWLTVGRLPERAGSVNGWGLAFRACGERLIVIGGPKCSGGGFIELNSWIPSDGGPPQWTLLDRKHSPTFVYNCAVMGC

SEQ ID NO: 4318 - protein, 212 aa, Arabidopsis thaliana
MAGIKVFGHPASTSTRRVLIALHEKNLDFELVHVELKDGEHKKEPFLSRNPFGQVPAFEDGDLKLFESRAITQYIAHRYENQGTNLLPADSKNIAQYAIMSIGIQVEAHQFDPVASKLAWEQVFKFNYGLNTDQAVVAEEEAKLAKVLDVYEARLKEFKYLAGETFTLTDLHHIPVIQYLLGTPTKKLFTERPRVNEWVAEITKRPASEKVL

SEQ ID NO: 4319 - protein, 275 aa, Arabidopsis thaliana
MSPVNAEVEEMRSESPVVNDKALDISDDDHDDENEPLIVSGECRICSDESPVENLESPCACSGSLKYAHRKCVQRWCNEKGNIICEICHQPYQPGYTAPPPPLQPEETTIDIGGGWTISGLDVHDPRLLAIAEAERRYLESEYVEYTASSASGAAFCRSAALILMALLLLRHALTITDDTDGEEDDPSSILSVSSLKLLPFFFFFYFLSQLHLSCNTKPQNCLILILACPAPSCWISSSMLYHGLGHQYSTAPKTETGSCSFGYTVCVGASVRAA

SEQ ID NO: 4320 - protein, 555 aa, Arabidopsis thaliana
MRRSHARSRVKNSSSSKSDMDPIKFQIRSGNRAPSSSSTYTLTKPNSKHAKSNLLLTVGSISVVLGVLFLCYSILFSGGNLRGSLRYSVVIDGGSTGTRIHVFGYRIESGKPVFEFRGANYASLKLHPGLSAFADDPDGASVSLTELVEFAKGRVPKGMWIETEVRLMATAGMRLLELPVQEKILGVARRVLKSSGFLFRDEWASVISGSDEGVYAWVVANFALGSLGGDPLKTTGIVELGGASAQVTFVSSEPMPPEFSRTISFGNVTYNLYSHSFLHFGQNAAHDKLWGSLLSRDHNSAVEPTREKIFTDPCAPKGYNLDANTQKHLSGLLAEESRLSDSFQAGGNYSQCRSAALTILQDGNEKCSYQHCSIGSTFTPKLRGRFLATENFFYTSKFFGLGEKAWLSNMISAGERFCGEDWSKLRVKDPSLHEEDLLRYCFSSAYIVSLLHDTLGIPLDDERIGYANQAGDIPLDWALGAFIQQTATETSQHAASGNLHWFHALFSNHPKTLHYLIGIPILMTVLVYLVTKWRKPQLKTIYDLEKGRYIVTRIR

SEQ ID NO: 4321 - protein, 524 aa, Arabidopsis thaliana
METQPQQPPPPPVAEKLNPKLEKELNLESLKTRAVSLAKAIARILEDFDAYGRTNTTPKWQDILGQYSMVNLELFNIVEEVKRVSNAFVVLPKNVNAMNAAILPVMLSSKLLPEMETDDNAKREQLLQGVQSLPIPMQIERLKARMDMIAAACENAERVLADTRKAYGFGTRQGPSMLPTMDKGQAAKIQEQEKMLRDAVNDGKGTQLPPDQRQITTALPPHLADVLIINDAGKIALPGQSNNINNQGMMQVSGTQFVGRSAASPSGPNFDNTTSPLPYSNSPRATGMVNVPSPQHQIQQQQFQQQQQRSKLMQLPQHQQQQLLAQQQQQLRQSSMQGLGQSQIPALHDMHGQAQQKFQTSHGQHQMPYSQPMGAHQQFQARQLSGGHIQHSMSQGQLNPAMNRHLNQFSGGANSALFTSAQGSPSSQMIPNMSSMQSQTLVPRMQQFGVSGTNPQRSHSSQMLGDQMFNTSGMMQTQQTQIQQSQQQQQQQQQGGYGNMQTNQQSLQPNNMMQNAQQRHQNPQ

SEQ ID NO: 4322 - protein, 513 aa, Arabidopsis thaliana
MAEKEEKEPSKLKSSTGVSRPTISLPPRPFGEMFFSGGVGFSPGPMTLVSNLFSDPDEFKSFSQLLAGAMASPAAAAVAAAAVVATAHHQTPVSSVGDGGGSGGDVDPRFKQSRPTGLMITQPPGMFTVPPGLSPATLLDSPSFFGLFSPLQGTFGMTHQQALAQVTAQAVQGNNVHMQQSQQSEYPSSTQQQQQQQQQASLTEIPSFSSAPRSQIRASVQETSQGQRETSEISVFEHRSQPQNADKPADDGYNWRKYGQKQVKGSDFPRSYYKCTHPACPVKKKVERSLDGQVTEIIYKGQHNHELPQKRGNNNGSCKSSDIANQFQTSNSSLNKSKRDQETSQVTTTEQMSEASDSEEVGNAETSVGERHEDEPDPKRRNTEVRVSEPVASSHRTVTEPRIIVQTTSEVDLLDDGYRWRKYGQKVVKGNPYPRSYYKCTTPDCGVRKHVERAATDPKAVVTTYEGKHNHDVPAARTSSHQLRPNNQHNTSTVNFNHQQPVARLRLKEEQIT

SEQ ID NO: 4323 - protein, 398 aa, Arabidopsis thaliana
MYLVESKGGAIACMLLALLSLGTWPAVLTLLERRGRLPQHTYLDYSITNLLAAIIIAFTFGQIGSTKPDSPNFITQLAQDNWPSVMFAMAGGIVLSLGNLSTQYAWALVGLSVTEVITSSITVVIGSTLNYFLDDKINKAEILFPGVACFLIAVCLGSAVHRSNADDNKAKLRDFETAKQEASGPSTEIGTNSSKDLETNVTTKPKEGTARFLIELENTRAIKVFGKRKIIGLAITFFAGLCFSLFSPAFNLATNDQWNRLKQGVPKLVVYTAFFYFSVSCFIIALILNVVFLYYPVLGLPKSSFKAYLNDWNGRYWAFLAGFLCGFGNGLQFMGGQAAGYAAADSVQALPLVSTFWGVVLFGEYRRSSRKTYLLLFCMLFMFISAVAVLMASSGHRK

SEQ ID NO: 4324 - protein, 439 aa, Arabidopsis thaliana
MRADNDHALGNSIEICKDESKPHQCLDENWEDAELKVPENGKNNNNVCELFYDTRSGEEWENEAGKKVRDTSHDCDANVDSPEKKDPVFYMDKNVTACDLPEIVVCYKENTYHIVKDICVDEGVPVQEKFLFGEKDSVKSSSTEDLMKADKTNVNPSETKSAEDSISKVDDSEFCNDHKTDRDVEESSGEDFADAEGTSSNYNQEHLIVTEEVKASPTHGLSPSEIEPDENSKDEVAISQDNDSKECLTLGDILSREDEQKSLNQDNISSDSHEEQSPSQLQDKEKRSLETTAIETELEKTEEPKQGEEKLSSVSTTTSQEPNKTCNEPEKPETENHHQQNCLVENSYEDDKFSSSRFGETSFSAADSVSISGHITYSGPIAYSGSLSVRSDASTTSGRSFAFPILQSEWNSSPVRMAKADKRRQKGGWRHTLLCCRFS

SEQ ID NO: 4325 - protein, 650 aa, Arabidopsis thaliana
MSRNLDSPVQTQMAVAVFKTPLTGASKMEGKQHHKHQHLQRQSSGRRVFVQTETGCVLGMELDRSDNVHTVKRRLQIALNFPTEESSLTYGDMVLTNDLSAVRNDSPLLLKRNFMHRSSSTPCLSPTGRDLQQKDRSGPIEILGHSDCFSIVKHMVKDIVKAMKMGVEPLPVHSGLGGAYYFRNKRGESVAIVKPTDEEPFAPNNPKGFVGKALGQPGLKSSVRVGETGFREVAAYLLDYGRFANVPPTALVKITHSVFNVNDGVKGNKPREKKLVSKIASFQKFVAHDFDASDHGTSSFPVTSVHRIGILDIRIFNTDRHGGNLLVKKLDGVGMFGQVELIPIDHGLCLPETLEDPYFEWIHWPQASLPFSDEEVDYIQSLDPVKDCDMLRRELPMIREACLRVLVLCTIFLKEASAYGLCLAEIGEMMTREFRPGEEEPSELEVVCIEAKRSVTERDVFSPRSDVVGEAEFQFDLDCDDLESVYSSKIQLTDDYFTKNPFSNGRSSLGKLEESIKEEEEDEEEEEDKTENTVPMIIMKDSFFSSAAFHDKAPSLSKLSTSMKNTHLSDTTRKNPKPLTRGKSENTSSGHKSANEQLPVSASFVKVADMKEDEWVLFLERFQELLGPAFAKRKTATLSKRQRLGTSCQF

SEQ ID NO: 4326 - protein, 206 aa, Arabidopsis thaliana
MATIAGGSFGVPSSRISITTPTLSSSSLLPPLTLQSGTRKDNLLRCALQESSTSAVATEKKNKEEGEESTVAVPAKKPKPAAKAAAVAKPLRQMMEEDVIPPLQAILESQDDISDIDLSFQDDKLEGFFLKKSIPYSFWAFFPTGNLTGEQKDFQFPHTGQVRAPWNHFLSTRGNQLRTTLCFGSRSVLLHKGSSPFGTNEVFVHL

SEQ ID NO: 4327 - protein, 162 aa, Arabidopsis thaliana
MGLSSLPGPSEGMLCVILVNTALSISIVKGIVRSFLGIVGISLSPSSSSPSSVTVSSENSSTSESFDFRVCQPESYLEEFRNRTPTLRFESLCRCKKQADNECSVCLSKFQGDSEINKLKCGHLFHKTCLEKWIDYWNITCPLCRTPLVVVPEDHQLSSNVW

SEQ ID NO: 4328 - protein, 146 aa, Arabidopsis thaliana
MQKPRSGPNLFLLSLSIILSRFMLSFDCGRQLEHTLSFLLCWCKIYLRTLPLETPRSFFHGCKSLKKSGIMIPPPRSGDYRNFFKLSSMLHLFIESIQSLLLLSIARDLPIVFTRVKKMGIMIPLLTSGYSPCCPNALFAFRIDEP

SEQ ID NO: 4329 - protein, 413 aa, Arabidopsis thaliana
MDNVRGSIMLQPLPEIAESIDDAICHELSMWPDDAKDLLLIVEAISRGDLKLVLVACAKAVSENNLLMARWCMGELRGMVSISGEPIQRLGAYMLEGLVARLAASGSSIYKSLQSREPESYEFLSYVYVLHEVCPYFKFGYMSANGAIAEAMKDEERIHIIDFQIGQGSQWIALIQAFAARPGGAPNIRITGVGDGSVLVTVKKRLEKLAKKFDVPFRFNAVSRPSCEVEVENLDVRDGEALGVNFAYMLHHLPDESVSMENHRDRLLRMVKSLSPKVVTLVEQECNTNTSPFLPRFLETLSYYTAMFESIDVMLPRNHKERINIEQHCMARDVVNIIACEGAERIERHELLGKWKSRFSMAGFEPYPLSSIISATIRALLRDYSNGYAIEERDGALYLGWMDRILVSSCAWK

SEQ ID NO: 4330 - protein, 536 aa, Arabidopsis thaliana
MNFTESMNVVHARIQQLEPENAAKIFGYLLLMQENGNRDMIRLAFCPDSVMCSVINCVKYELARNSHHYHSPPSDHIPTPKFGSFTGSSPLSVSVSPPMKTGFWENSTEMDTLQNNLQFLNFEDPLTSPEFSNGFFSQERQCLPLRTSRRSPSLPEFPVKICHYFNKGFCKHGNNCRYFHGQIIPERESFAQMFNPNNNLSDEEHVVSPVSLEKLEGEIIELLKLRRGAPISIASLPMMYYEKYGRTLQAEGYLTESQRHGKAGYSLTKLLARLKNTIRLVDRPHGQHSVILAEDASKFVEYTGERNEHGAILAGSRQIYLTFPAESSFTEHDVSIYFTSYGHVEDVRIPCQQKRMYGFVTFASSETVKHILAKGNPHFICNARVLVKPYREKSRSSRYLDNYKPLHGMRYGSKFIERDIEMNTLPPRVSESSRMRKPFLSEPEQSVSKSLPTNYSYLGFSSDDFKLTSNAEQEEQAERLSYLLDYLNTEDNVMNITTNYRDNDRRTHCESLDSQVLNLPESPFSSLSGKEISTVT

SEQ ID NO: 4331 - protein, 467 aa, Arabidopsis thaliana
MAKKRESPKLIKIKDAIKLINQQVSLIGIVLEQREPKQCRNNDWICTLRIIDDTYPSPGLTVNVFSKTLEQLPQIKNHDDMILFTRIKMQTFDSGERVNAACSRWVSSFALFEGVDFVCYQCSTNFHEEEALYKSAMDDLRKVFAGCSQVIKAMQSISYRTKPCSEVFSFLREIKIGKRFDLVCRILHADEDTSAVFVWDGTDAPPASILAKRSEEDKAFSSLSVHTLLSRDVLLSFPTVGTILRVHLSSHLFYRVKPGDWVKLYHLLCEVDRGSWVIKVTSSTKVHHLAQDDRLVEKIMRIYDKRLSSKLGHISFWCFPSPPGLTETDDNCAPFVTLMDIITFPKVTCKYRCIVRVVAAYPWQVEDFCSDENRRHHQVLLTLEDSTATLEAFLCNKDAEYFWGLGFQDTETLRKKRNWLLGIRESSNFVAPRNPPWIECCILSYYTNKADPWNTRLYRIFGTRLLH

SEQ ID NO: 4332 - protein, 164 aa, Arabidopsis thaliana
MAISSFKHEHPLVEMNIDVEVTKFHLSLLCSVVESLLFTGRRIAISVPWNPKILSLKKRQAEAARIREKYPDRIPVIVERAEKSDVPDIDRKKYLVPADLTVGQFVYVVRKRIKLSPEKAIFIFVKNILPPTAAIMSAIYEEHKDEDGFLYMSYSGENTFGIFF

SEQ ID NO: 4333 - protein, 52 aa, Arabidopsis thaliana
MRLFNCLDYEEFQYVRLLDQESFLRSTSTDLFCFTVGISCFRPLWFFGKVVC

SEQ ID NO: 4334 - protein, 393 aa, Arabidopsis thaliana
MTIRNQRFSLLKQPISSTLNQHLVDYPTPSNLSYWWGFGPLAGICLVIQIVTGVFLAMHYTPHVDLAFNSVEHIMRDVEGGWLLRYMHANGASMFLIVVYLHIFRGLYHASYSSPREFVWCLGVVIFLLMIVTAFIGYVLPWGQMSFWGATVITSLASAIPVVGDTIVTWLWGGFSVDNATLNRFFSLHHLLPFILVGASLLHLAALHQYGSNNPLGVHSEMDKIAFYPYFYVKDLVGWVAFAIFFSIWIFYAPNVLGHPDNYIPANPMSTPPHIVPEWYFLPIHAILRSIPDKAGGVAAIAPVFICLLALPFFKSMYVRSSSFRPIHQGMFWLLLADCLLLGWIGCQPVEAPFVTIGQISPLVFFLFFAITPILGRVGRGIPNSYTDETDHT

SEQ ID NO: 4335 - protein, 63 aa, Arabidopsis thaliana
MYTQQGFSNLPICMSKTQYSFSHDTSKKRAPSGFVLPIRDVRGSIGAGFIYTTKKTVNPLAGM

SEQ ID NO: 4336 - protein, 90 aa, Arabidopsis thaliana
MYTQQGFSNLPICMSKTQYSFSHDASKKGAPSGFVLPIRDVRGSIGAGFIYPLVGTMSTMPGLPTRPCFYEIDISQSFKASLHRRSSLPQ

SEQ ID NO: 4337 - protein, 177 aa, Arabidopsis thaliana
MQCGMLREEKGFAVTDSSSPETSFISCHRLIITGNFLHQPADQLSPPRNLYLCLRLYLLAFCHRSPEEIEQDEDSNSSYSVPINRINLINPPRRTDALNKPFWRSKELPSLGRRIKHSMNKDPFDDFWNFHLPEIGRVNLSLQKATKRERKKVNPNKSERETGIKTGNLKHKPKSSD

SEQ ID NO: 4338 - protein, 780 aa, Arabidopsis thaliana
MNPMQGPRSIGGSSTEVNQVDGESIYCTETSLNTMLNPADTGFPNNSTPSGRPTYASSSSHAAQDHTWWRFGESSSIPGPSDQVNSIGIKTSHQLPQDGTHHFVGYGSEGRQTGLNGMMVDGGVHAGSHIRNVPSFLRGSSSNPMPQHVDMSMDMDSDNCNAQTSGVVIRHNSYGSSLGSSVQAAGESSSGPASPFGGWGSSCKRKALEGSPSHYFSGETPNRIVQTENSASHASLSQYGASSSLSLATPSQSSPNVTNHFGRTEQMFGSGGGRAVAASAFHSTRNTDTLSRAGRRLNPRQPQESVAFSVSHGGTSVRPTGSLQQNLPLNSPFVDPPDVRSSSITSGSNTGENQTNIVHLPALTRNIHQYAWDASFSSRASNPSGIGMPAERLGPQWETPRSNQEQPLFAPATDMRQPVHDLWNFARGSPGSSVDSLFVPRAGPSSAIHTPQPNPTWIPPQNAPPHNPSRTSELSPWSLFPSIESPSASHGGPLPLLPAGPSVSSNEVTMPSSSNSRSHRSRHRRSGLLLERQNELLHLRHIGRSLAADGNGRNQIISEIRQVLHAMRRGENLRVEDYMVFDPLIYQGMTDMHDRHREMRLDVDNMSYEELLALGERIGDVSTGLSEEVILKAMKQHKHTSSSPSSVELHQNIEPCCICQEEYVEGDNLGTLKCGHEFHKDCIKQWVMIKNLCPIFRFNKERRLCLFIMRMIKMIVPKPLGTSDKIGTIQRRLAWLLRKDDTYKSEKCYKKFSIQNFQIDFSELIVLLNNINFGSHSMNL

SEQ ID NO: 4339 - protein, 482 aa, Arabidopsis thaliana
MATYYKTGSSEIYSRPEFVPGNAMNYTNSFTETFPRDSTNNVSPSKEIQVLSSLGGVSQMVEIQDSGSWRDQEDNDRNRFPVMRRLGLSSQIETSRGNNNNEYATQVVSGFTRTIHNSKYLKAAQELLDETVNVKKALKQFQPEGDKINEVKEKNLQTNTAEIPQAERQELQSKLSKLLSILDEVDRNYKQYYHQMQIVVSSFDVIAGCGAAKPYTALALQTISRHFRCLRDAISGQILVIRKSLGGEQDGSDGRGVGISRLRNVDQQVRQQRALQRLGVMQPHTWRPQRGLPDSSVLVLRAWLFEHFLHPYPKDSDKIMLARQTGLSRGQVSNWFINARVRLWKPMVEEMYKEEFTDALQENDPNQSSENTPEITEIQELQTESSSNNGHVPGVASSSMRQNTVAHGGDRFMMVTDMTRNGNGGMSLTLGIQNSDARGDVPMSGGIDNYKNTISGTDLQYLNSRNHQHQIGSSQLLHDFVA

SEQ ID NO: 4340 - protein, 468 aa, Arabidopsis thaliana
MGRVRKSDFGSIVLVLCCVLNSLLCNGGITSRYVRKLEATVDMPLDSDVFRVPCGYNAPQQVHITQGDVEGKAVIVSWVTQEAKGSNKVIYWKENSTKKHKAHGKTNTYKFYNYTSGFIHHCPIRNLEYDTKYYYVLGVGQTERKFWFFTPPEIGPDVPYTFGLIGDLGQSYDSNITLTHYENNPTKGQAVLFVGDISYADTYPDHDNRRWDSWGRFAERSTAYQPWIWTTGNHELDFAPEIGENRPFKPFTHRYRTPYRSSGSTEPFWYSIKRGPAYIIVLASYSAYGKYTPQYQWLEEEFPKVNRTETPWLIVLMHSPWYNSYDYHYMEGETMRVMYEAWFVKYKVDVVFAGHVHAYERSERVSNIAYNVVNGICTPVKDQSAPVYITIGDGGNIEGLATKMTEPQPKYSAFREASFGHAIFSIKNRTHAHYGWHRNHDGYAVEGDRMWFYNRFWHPVDDSPSCNS

SEQ ID NO: 4341 - protein, 53 aa, Arabidopsis thaliana
MNAMLLFTSICISILHSLAFYKWHMPNYLINLIYWLCNCTPMVCDIYSYGARS

SEQ ID NO: 4342 - protein, 382 aa, Arabidopsis thaliana
MDVNRKAHPDCRYSSNPFHECASDCLEKISQGRGNKNSKKQGSKILSLPGSFGKKKTESQPPSPLSTRNYQNGAANTPKVRQSRPSPVAMKKTPVPEANKSLHSLSSDGISIDLNGQNDSFNHKQEKPSRTVPLSPNSMADRGKPLSPRPQGHEHSGKNDTASEISLFNVVSPPRSCANDDDDDDDENNGYEEGVELDLISVMSDSCVSVGKYRVNSSVSTILQSIIDKHGDIAANCKLESASMRSRYLECLCSLMQELGSTPVGQLTELKVKEMVAVLKDLESVNIDVGWMRSVLEEFAQYQENTDSEKERQEGLVRSKKQEMEIQEADLARIEKEVAEARLRVEEMKAELAELETERLRMEEMGFKVEKYKGKTFLDELL

SEQ ID NO: 4343 - protein, 562 aa, Arabidopsis thaliana
MEDLRRRFPTKKNGEEISNVAVDPPLRKASDALPLPLYLTNTFFLSLFFATVYFLLSRWREKIRNSTPLHVVDLSEICALIGFVASFIYLLGFCGIDLIFRSSSDDDVWVNDGMIPCNQSLDCREVLPIKPNSVDPPRESELDSVEDEEIVKLVIDGTIPSYSLETKLGDCKRAAAIRREAVQRITGKSLTGLPLEGFDYNSILGQCCEMPVGYVQIPVGIAGPLLLDGVEYSVPMATTEGCLVASTNRGFKAIHLSGGAFSVLVKDAMTRAPVVRFPSARRAALVMFYLQDPSNFERLSLIFNKSSRFARLQSITCTIAGRNLYPRFACSTGDAMGMNMVSKGVQNVLDFVKSEFPDMDVIGISGNYCSDKKASAVNWIEGRGKHVVCEAFIKAEIVEKVLKTSVEALVELNTLKNLVGSAMAGSLGGFNAHSSNIVSAVFIATGQDPAQNVESSHCMTMILPDGDDLHISVSMPCIEVGTVGGGTQLASQAACLNLLGVKGSNNEKPGSNAQQLARIVAGSVLAGELSLMSAIAAGQLVKSHMKYNRSSRDIGPSSQVNR

SEQ ID NO: 4344 - protein, 526 aa, Arabidopsis thaliana
MDSKEMVVEEIMRIHRSLPLRPEIDDVETATSLIQNVEKEDRNRLEAIDKLVKTSSSEVPLELFNVFKEMKKSLVRFQSTEQTREATKILDLESVHVVFDELIQRASFCIASPNSTTALPRSVPVPAPVVSSDEIPFKSKEIISRDDTFVKKAKSSFYSDGLLAPSKPQVLDSTLHQAKNVAGNDGEKLSLIKLASLIEVSAKKATQELNLQHRLMDQLEWLPDSLGKLSSLVRLDLSENCIMVLPATIGGLISLTRLDLHSNRIGQLPESIGDLLNLVNLNLSGNQLSSLPSSFNRLIHLEELDLSSNSLSILPESIGSLVSLKKLDVETNNIEEIPHSISGCSSMEELRADYNRLKALPEAVGKLSTLEILTVRYNNIRQLPTTMSSMANLKELDVSFNELESVPESLCYAKTLVKLNIGNNFANLRSLPGLIGNLEKLEELDMSNNQIRFLPYSFKTLSNLRVLQTEQNPLEELPRDITEKGAQAVVQYMNDLVEARNTKSQRTKPKKSWVNSICFFCKSSTN

SEQ ID NO: 4345 - protein, 593 aa, Arabidopsis thaliana
MGIIDGSLLRRLICLCLWCLLGGGVTVVTAEDEKKVVHKQLNQTPTWAVAAVCTFFIVVSVLLEKLLHKVGKVLWDRHKTALLDALEKIKAELMVLGFISLLLTFGQTYILDICIPSHVARTMLPCPAPNLKKEDDDNGESHRRLLSFEHRFLSGGEASPTKCTKEGYVELISAEALHQLHILIFFLAIFHVLYSFLTMMLGRLKIRGWKHWENETSSHNYEFSTDTSRFRLTHETSFVRAHTSFWTRIPFFFYVGCFFRQFFRSVGRTDYLTLRNGFIAVHLAPGSQFNFQKYIKRSLEDDFKVVVGVSPVLWGSFVLFLLLNIDGFKMMFIGTAIPVIIILAVGTKLQAIMTRMALGITDRHAVVQGMPLVQGNDEYFWFGRPHLILHLMHFALFQNAFQITYFFWIWYSFGSDSCYHPNFKIALVKVAIALGVLCLCSYITLPLYALVTQMGSRMKKSVFDEQTSKALKKWRMAVKKKKGVKATTKRLGGDGSASPTASTVRSTSSVRSLQRYKTTPHSMRYEGLDPETSDLDTDNEALTPPKSPPSFELVVKVEPNKTNTGETSRDTETDSKEFSFVKPAPSNESSQDR

SEQ ID NO: 4346 - protein, 275 aa, Arabidopsis thaliana
MATNACLESDSLLPPRKRLLAGFKNQNSRISNESPSPPFASSSSSTTTSNGSSASAVVHTHHLDHLLNDQTRSPEELAQASKATAALAVKVAKAARATANEKAIIASKAVAAAKNALELFASFPAAETVSCKEPRLIRAINNSPRVLTDCSGHRNKKQKTLTSTMNDGNDVAGVVDSDDGTRVNGKLLLCDNTLKEKTEEESSSLGKRRGRVKLPLSMCAYKDQENGITLEENNLSVSKSEGYNGGVAQVIERPSWKCQDLKSPECVKQNKVVRS

SEQ ID NO: 4347 - protein, 779 aa, Arabidopsis thaliana
MGGLLHLFDFHNNSFSRKVFSHHKNRDEDLEAPRNSFELQVDNFHTYHNGKDKPSNGFEEEEWYERSCYPIEESMKKKIIEELSKRSNDKQNTPSLVAKLMGMDALPLESVKSSSAWIYPRQSKVNRFDDEKGGRRSRKGRLSSAVTALDVMETPMRREHPQEEELQRFRREFEAWQADKRFKDCSRIVDSGCVVARDENKERLFTRTRSFGRDFTLKSDRTAPTRIVVLRPGLQRAYDYEDSLTTSSGTTMEGSRGSSIEEFLEEVKERLKGELQGKAALKRSSSVRGSGIETPFSERPSPRSESMRSYAVSEVQCNAPDSPTEFISRDTRKLLAERLKNVLRKEMTPSHDSVTKSSSRLRPTVSDAAKQAEEINQEDVSKKESLSPRNLKRSLSAPVSGTSFGKLLLEDRHVLTGAQIMRKHEATITEREETESETEPVVVDPIRRKERFNLRKKVSSFRSTLRGRIFGKKIRSMIESNSFEDESIKDFVTGSKFNNFYDRNENSTEVPPSPASVCSSTPEEFWRNVDYLSQVSTPDVTVSDENGMPQVFRDISSNLSELRRQINELESEVQVRTPVEEEPIQEIETIVDLGNPDKVFVRDLLVASGLYEGTSDISLSRWDPLAKLIKKSVLEETKENLKKRSNQNQEDDDTGETTISEENHNILFDLLNEVLTVVLGPLTKSGFKNKLLSSSVSESTTIRGKYLLESTWKIMSEYLYSQPERPFCSLDGIIGWDMDRFPWSALIGEEVNVLGKEVEGMIMADLVEELVKDLRRQIC

SEQ ID NO: 4348 - protein, 338 aa, Arabidopsis thaliana
MARIGSFLIILYLIYALTLCICDDDESNYGGDKGNLFPGFYRSSCPRAEEIVRSVVAKAVARETRMAASLMRLHFHDCFVQGCDGSLLLDTSGSIVTEKNSNPNSRSARGFEVVDEIKAALENECPNTVSCADALTLAARDSSVLTGGPSWMVPLGRRDSTSASLSGSNNNIPAPNNTFNTIVTRFNNQGLDLTDVVALSGSHTIGFSRCTSFRQRLYNQSGNGSPDRTLEQSYAANLRQRCPRSGGDQNLSELDINSAGRFDNSYFKNLIENMGLLNSDEVLFSSNEQSRELVKKYAEDQEEFFEQFAESMIKMGNISPLTGSSGEIRKNCRKINNS

SEQ ID NO: 4349 - protein, 171 aa, Arabidopsis thaliana
MASSSSTYRSSSSSDGGNNNPSDSVVTVDERKRKRMLSNRESARRSRMRKQKHVDDLTAQINQLSNDNRQILNSLTVTSQLYMKIQAENSVLTAQMEELSTRLQSLNEIVDLVQSNGAGFGVDQIDGCGFDDRTVGIDGYYDDMNMMSNVNHWGGSVYTNQPIMANDINMY

SEQ ID NO: 4350 - protein, 382 aa, Arabidopsis thaliana
MSLTVPEFDFRLTPQFGFSQSPIGERNFADVDNLENCIKYLNQSLVTSGFSASLDLFATDPVSIARTCNCVYALIQQRQRDVEFRESANDQRQRLLSDMARLEAKVERLETQLQAKERELGSVTRTEAKNTAALKTQNEKLQKERDEFQRMVIANQQVKTQQLHETKKKEKEYIKLQERLNQVLMEKKKETRSGMEIMNLLQKEGRQRGTWSGKKTDSDFYKKIVDAYEAKNQELMAENTDLRALLRSTQGDMRSFLNASGGLTNQSLVANGRHGADPSQSPLGGKTDVFDLPFRMARGQIEDSLRSKMVSIKERMGQLVDAQKEVSITSEASERELELEAQLVEARSIIQEQESIMSKHLPKTDRRRNSAPPHSSVNGLRG

SEQ ID NO: 4351 - protein, 62 aa, Arabidopsis thaliana
MRKPCLLHVSRVLVWLERKDSLSLVYNLPLHVKFVCFVGTLTGRYLYRAKTHEREKEKEMVW

SEQ ID NO: 4352 - protein, 815 aa, Arabidopsis thaliana
MDIGLRIFVVFVLLVAVTAEVYIVTMEGDPIISYKGGENGFEATAVESDEKIDTSSELVTVYARHLERKHDMILGMLFEEGSYKKLYSYKHLINGFAAHVSPEQAETLRRAPGVRSVDKDWKVRRLTTHTPEFLGLPTDVWPTGGGFDRAGEDIVIGFVDSGIYPHHPSFASHHRLPYGPLPHYKGKCEEDPHTKKSFCNRKIVGAQHFAEAAKAAGAFNPDIDYASPMDGDGHGSHTAAIAAGNNGIPLRMHGYEFGKASGMAPRARIAVYKALYRLFGGFVADVVAAIDQAVHDGVDILSLSVGPNSPPTTTKTTFLNPFDATLLGAVKAGVFVAQAAGNGGPFPKTLVSYSPWITTVAAAIDDRRYKNHLTLGNGKMLAGMGLSPPTRPHRLYTLVSANDVLLDSSVSKYNPSDCQRPEVFNKKLVEGNILLCGYSFNFVVGTASIKKVVATAKHLGAAGFVLVVENVSPGTKFDPVPSAIPGILITDVSKSMDLIDYYNASTSRDWTGRVKSFKAEGSIGDGLAPVLHKSAPQVALFSARGPNTKDFSFQDADLLKPDILAPGYLIWAAWCPNGTDEPNYVGEGFALISGTSMAAPHIAGIAALVKQKHPQWSPAAIKSALMTTSTVIDRAGRLLQAQQYSDTEAVTLVKATPFDYGSGHVNPSAALDPGLIFDAGYEDYLGFLCTTPGISAHEIRNYTNTACNYDMKHPSNFNAPSIAVSHLVGTQTVTRKVTNVAEVEETYTITARMQPSIAIEVNPPAMTLRPGATRTFSVTMTVRSVSGVYSFGEVKLKGSRGHKVRIPVVALGHRR

SEQ ID NO: 4353 - protein, 1211 aa, Arabidopsis thaliana
MSAPGKFDYSSGGLDRPLYRSNFAAQMERSSSFRESMEHPVPSHPIMLRTTSPIAQTDVTNFFQCLRFDPKVVAADHKSIRQGDFKRHVSIALGILGDESPSGSLKGKFIPSPIPEEIKRFKAGLRENNVKARERVKIFNEASSVFNKFFPSVPTKKRSRPEGFSGDRSGDRLVSGPGLGKMGIQGQTLAGGFELDQQKLDERPKSGVPNKRTRTSMMDVRNNCIVRQSAAVDKDKEIMRVGNHNAVQGEDRTSTGIDGWETSKMKKKRSSINADCHPNLASNKVVDGYRDLKQGIQQKPTGDSRSRVNGDSNMFRQSAGNGATGYGRSDSLSHQTSLAGHSPLARVDSDHNSLYSEKRERSIVSDKERVNLRGVNKSNIHDEFNSSSLVSNTKTNASVRGPRSGSGLPPKLSPGLHNTPSPIEWDISGCTNKPPTLSGVTQRKRMTSNRSSSPPVTQWASQRPQKISRIARRTNLVPIVSSQDEVPYSDNISDVGCSETGFGFHKRSPAASPQLKLKGESSFSTAALSESEESGHPEIKSKDKGKQSDEVDGKAAQNIPRVSIPALQSRKSNKPAAGEEIGDGVRRQGRTGRGFSSTRSLNPNGVNKLKNVGTAKHLRSARPIFDKNESKVGRPPTRKLSDRKAYKRQRATATNAPTLDFHVGSNDGREELLAAVNSAINIAQNFPNSFWKQMERYFGYISDDHINFLKQQGELSSMGPTPVLTSSEFDSPVFPEELATSRADSKASPLYQRLLSALISEDSMGVNEDLQVDLDDDSEFSVLNNMEFNGFRNNERLELDESENDGSAILFKGVDKSAHHCNGKFPDNSPIDFVDIQYDKLGIDEKIYLEAQSLGISIDLMPSISNVEDEGIADEIKKLEEAICNEGSKKKEIVDRLLKPAIEMKELQEKELDQLGYEKLIEMAYEKSKASRRHHNAGGKNSNNKISKQAALAFVRRTLERCHQFEKTGKSCFSEPEIKDMFIAGLATAEDTLMDKEYNTSTSTPMGSQPSSSLALIGQNSENYAKSSDVLPSENALLEQTTGKEDTAWSNRVKKRELLLDDVGIGTQLSSNTKGKRSDRDRDGKGQASSRGGTNKIGRPSLSNAKGERKTKAKPKQKTTQISPSVRVPEQPKPSLPKPNEANSEYNNLEALEETEPILDLSQLQIPDGLGDFDAQPGDINSWFNMDDEEDFDMTELGIPTDDISELNIKL

SEQ ID NO: 4354 - protein, 433 aa, Arabidopsis thaliana
MEPRVGNKFRLGRKIGSGSFGEIYLGTDVQTNEEVAIKLESVKTAHPQLSYESRIYRVLQGGTGIPNMKWYGVEGDYNVLVMDLLGPSLEDLFSYCKRQFSLKTVLMLADQMINRLEFIHSKSYLHRDIKPDNFLMGLGRRANQVYIIDYGLAKKYRDSSTHRHIPYRENKSLIGTPRYASLNTHLGIEQSRRDDIESLGYILMYFLKGSLPWQGLKAGNKKQKYDKISEKKVSTSIETLCRGHPTEFASYFHYCRSLRFDDKPDYAYLKRLFRNLFIREGFQFDFVFDWTVYKYQQSQSGNPQPRPHDGGVGTSSGLNPAVGNSEKRPDVPNQRTNPDFTLKQKDKNGNDSAIAKDKLLPGSLNLGRSEGSSSRRVVDTSSREPFSGGSDNANYETALKGIDGLRINNNAGDETAATPQSNGDDVEPQSKAL

SEQ ID NO: 4355 - protein, 430 aa, Arabidopsis thaliana
MARILRNVYSLRSSLFSSELLRRSVVGTSFQLRGFAAKAKKKSKSDGNGSSEEGMSKKEIALQQALDQITSSFGKGSIMYLGRAVSPRNVPVFSTGSFALDVALGVGGLPKGRVVEIYGPEASGKTTLALHVIAEAQKQGGTCVFVDAEHALDSSLAKAIGVNTENLLLSQPDCGEQALSLVDTLIRSGSVDVIVVDSVAALVPKGELEGEMGDAHMAMQARLMSQALRKLSHSLSLSQTLLIFINQVRSKLSTFGGFGGPTEVTCGGNALKFYASMRLNIKRIGLIKKGEETTGSQVSVKIVKNKLAPPFRTAQFELEFGKGICKITEIIDLSIKHKFIAKNGTFYNLNGKNYHGKEALKRFLKQNESDQEELMKKLQDKLIADEAADKETESESEEEDSLRVVVSPDNTDDESPALVVGAAAVVVEAA

SEQ ID NO: 4356 - protein, 520 aa, Arabidopsis thaliana
MSTLDSIDAILFSLSRAFTSPFAVFVQIQGCTICLLLALGWLLAEYVRNREVKRIKNSIKAGNSLAFLYQDINELEHSRQVKLPRVSVVMPLKGFGEHNLHNWRSQITSLYGGPLEFLFVVESTEDPAYHAVSRLLSMYQDHVEAKVVVAGLSTTCSQKIHNQLIGVEKMHKDTKYVLFLDDDVRLHPGTIGALTTEMEKNPEIFIQTGYPLDLPSGTLGSYCIYEYHMPCSMGFATGGRTFFLWGGCMMMHADDFRQDRYGVVSGLRDGGYSDDMTLASLAGAHKRLITSPPVAVFPHPLASDLSFGRYWNYLRKQTFVLESYISKVNWIMNKALFAVHCYLSWGFVAPYVMAIIHITSALRIYIKGYHQLEDTTSASGGMMLVITLAICTFIELLSMWNLTRREVQLCNMLSPEAPRLSLATYNWGLVFVAMLVDNFLYPISAFRSHFSQSINWSGIRYHLKDGKIFKIERRKDMGPTKTDLGGKHLYGKKGAPQKASFLSSLGRNLAHWRQPKKFDV

SEQ ID NO: 4357 - protein, 952 aa, Arabidopsis thaliana
MESLPSPFGDPAPNLSNSELRETAYEILVAACRSTGSRPLTYIPQSPKSDRSNGLTTASLSPSPSLHRSLTSTAASKVKKALGMKKRIGDGDGGAGESSSQPDRSKKSVTVGELVRVQMRISEQIDSRIRRALLRIASGQLGRRVEMMVLPLELLQQLKASDFPDQEEYESWQRRNLKLLEAGLILYPCVPLSKSDKSVQQLKQIIRSGLERPLDTGKITGETQNLRSLVMSLASRQNNNGIGSETCHWADGFPLNLRIYQMLLESCFDVNDELLIVEEVDEVLELIKKTWPVLGINQMIHNVCFLWVLVNRYVSTGQVENDLLVAAHNLILEIENDAMETNDPEYSKILSSVLSLVMDWGEKRLLAYHDTFNIDNVETLETTVSLGILVAKVLGEDISSEYRRKKKHVDSGRDRVDTYIRSSLRMAFQQTKRMVEHSKKSKSRQSTNNLPALAILAEDIGHLAFNEKAIFSPILKNWHPLAAGVAAATLHSCYGTELKKFVSGITELTPDAIRVLTAADKLEKDLVQIAVQDAVDSEDGGKSVIREMPPFEAEVVIGNLVKSWIKIRVDRLKEWIDRNLQQEVWNPRSNKLGIAPSAVDVLRMVDETLEAFFLLPILLHPVLLPELTSGLDKCMQHYVSKAKSSCGSRNTFLPVLPALTRCTVGSRLHGVFKKKEKPMVASHRRKSQLGTGNDSAEILQFCCRINTLQYIRTEIESSGRKTLNRLPESEVAALDAKGKIFEQSISYCSKGIQQLSEATAYKIVFHDLSNVLWDGLYLGEVPSSRIEPFLQELERCLEIISSSVHDRVRTRVISDIMRASFDGFLLVLLAGGPSRGFTIQDSAAVEEDFKFLCDLFWSNGDGLPLDLIEKVSTTVKSILPLLRTDTDSLIERFKAVCLENHGSDRGKLPLPPTSGPWSPTEPNTLLRVLCYRYDEPATKFLKKTYNLPRKLT

SEQ ID NO: 4358 - protein, 178 aa, Arabidopsis thaliana
MGSTFFGRPNVVGSSPPSSSPTSSSSSPATRRGKKNGSEKPKQPQRGLGVAQLEKIRLHGEMSCNSFNSYNPSLYPQEDVRMQGGYSSIPSQSSAPYGFYPNMMMGVHRDQYDRATMSWNPSYGILESQHSLEPNITRHFLNEDPSSTTRRSKSLGSGIQHSGSSENQEVDLELRLSL

SEQ ID NO: 4359 - protein, 425 aa, Arabidopsis thaliana
MFCCGFMWKSGGEDLQGFYPVRPECQPDVPRTRFKSRAGKTLSARRWHAAFTEDGHLDMEKVLRRIQRGGIHPSIKGAVWEFLLGCYDPDSTFEERNILRNRRREQYGAWKEECKKMVPVIGSGKYVTMAVVQENGNPIDESSVENQGWIVKNTVTDERVLQWMLSLHQIGLDVARTDRYLCFYENDRNQSKLWDVLAIYTWLNLDIGYVQGMNDICSPMIILFDDEGDAFWCFERAMRRLRENFRATATSMGVQTQLGVLSQVIKTVDPRLHQHLEDLDGGEYLFAIRMLMVLFRREFSFLDALYLWELMWAMEYNPTMFATYEELENRNNAASDPKLLKRYGKFERKYINSGQNEQHRNTLAVFVVASVLQTKNKRLLKEAKGLDDVVQILGDIAGNLDAKKACKEALKIHEKFLKKANSNKQ

SEQ ID NO: 4360 - protein, 433 aa, Arabidopsis thaliana
MAAPTGNGPVIPILGFLTCVAFIYLSFGDLWFGLKTEGELAFVKRNGTQFVVDGKALYVNGWNSYWFMDHAVNDHSRHRVSAMLEAGAKMGLTVCRTWAFNDGGYNALQISPGRFDERVFKALDHVIAEAKTHGVRLLLSLVNNLQAYGGKTQYVNWAWQEGVGLSSSNDSFFFDPSIRRYFKNYLTVLLTRKNSLTGIEYRNDPTIFAWELINEPRCMSDVSGDTLQDWINEMTAFIKSIDNKHLLTVGLEGFYGPSSPKKLTVNPERWASELGSDFVRNSDSPNIDFASVHIYPDHWFHDQGFEEKLKFVVKWMLSHIEDGDKELKKPVLFTEFGLSNLNKDYDPSQRDRFYRTIFDVIYKSAKRKRSGAGTLVWQFLIEGMEGFNDDFGIVPWEQDSIQRLMIEQSCRLSRITGRHLLDKKSIEMCSHRP

SEQ ID NO: 4361 - protein, 526 aa, Arabidopsis thaliana
MMKNLPEVGNGGGSGFPAVSVGNKKNKYQRMDSDAEESQNHREAEARNSRTRKYVMACAFFASLNNVLLGYDVGVMSGAVLFIQQDLKITEVQTEVLIGSLSIISLFGSLAGGRTSDSIGRKWTMALAALVFQTGAAVMAVAPSFEVLMIGRTLAGIGIGLGVMIAPVYIAEISPTVARGFFTSFPEIFINLGILLGYVSNYAFSGLSVHISWRIMLAVGILPSVFIGFALCVIPESPRWLVMKGRVDSAREVLMKTNERDDEAEERLAEIQLAAAHTEGSEDRPVWRELLSPSPVVRKMLIVGFGIQCFQQITGIDATVYYSPEILKEAGIQDETKLLAATVAVGVTKTVFILFATFLIDSVGRKPLLYVSTIGMTLCLFCLSFTLTFLGQGTLGITLALLFVCGNVAFFSIGMGPVCWVLTSEIFPLRLRAQASALGAVGNRVCSGLVAMSFLSVSRAITVGGTFFVFSLVSALSVIFVYVLVPETSGKSLEQIELMFQGGLERKDGEVELGDAERLVRKEQEF

SEQ ID NO: 4362 - protein, 482 aa, Arabidopsis thaliana
MKSCEHELLKTRRGKSREVSSRFLSSPSASSSPNRRNSTSNSSRDDQNNNGVKGHLGLKKHDRMSDGTRVCFGLPNQSSIEVDTKENRMPSPWINDEDNVILPGRFSVDECALYRASSRRNSCSLLYESFNDETDSELSDVSCASSLSTNRSSWNHKPGIKVSSKYLHDLTAKPSKGNNKTKLRSQDDSQRTNSSKGIENRLQRNNSVSRYGSSMSQWALSPGRSLDTQAVTVPSSKLKPPRGKGVGKLINLGFDFFRSKNKSSPFTSPLKPKTCDTESAHQLKLMNNRLLQWRFVNARACDVNKNVASQEKNQLLCAWDTLIKLNNLVLQERIKLQKKNLEMKLNYVFLSQVKHLEAWEDMEIQHLSSLSIIRDSLHSVLSRLPLKEGAKVNLESAVSIIKNAEAVTDAIISTVDDYAPTMEGIVPLASQLAEVVVQEKLMLEKCHDLLRMISELEMQERSLKCCFLIQHKQTFDTNLLKH

SEQ ID NO: 4363 - protein, 431 aa, Arabidopsis thaliana
MSSGLNEDFLDCIVRLEETHVQQGFDEGYEEGLVSGREDARHLGLKLGFETGELIGFYRGCSALWNSALRIDPTRFSPQLHKHLNDFHVLLDKIPLLDPEDEAKDGIKDDLRVKFSIICASLGFSKKQFEWSEEMLREMLGCCKVYISEARNKTALEAIERALKPFPPAAIVNKFEDAAYGRVGYTVVSSLANGSSSSLKNAVFAMVKTALDTINLELHCGSHPRLGVVDHICFHPLSQTSIEQVSSVANSLAMDIGSILRVPTYLYGAAEKEQCTLDSIRRKLGYFKANREGHEWAGGFDLEMVPLKPDAGPQEVSKAKGVVAVGACGWVSNYNVPVMSNDLKAVRRIARKTSERGGGLASVQTMALVHGEGVIEVACNLLNPSQVGGDEVQGLIERLGREEGLLVGKGYYTDYTPDQIVERYMDLLNNS

SEQ ID NO: 4364 - protein, 579 aa, Arabidopsis thaliana
MGFFSTILGFCGFGVGISLGLVIGYVLFVYLLPNDVKDPEIRSIADQDPKAMLRMLPEIPLWVKNPDFDRVDWINRFLEYMWPYLDKAICKTAKNIAKPIIEEQIPKYKIDSVEFETLTLGSLPPTFQGMKVYLTDEKELIMEPCLKWAANPNILVAIKAFGLKATVQVVDLQVFAQPRITLKPLVPSFPCFANIYVSLMEKPHVDFGLKLGGADLMSIPGLYRFVQVDIFLLHTSFKSLTCMSKNFFMRERADETVTFRLANTYEQIKDQVANMYLWPKTLVVPILDPAKAFRRPVGIVHVKVVRAVGLRKKDLMGGADPFVKIKLSEDKIPSKKTTVKHKNLNPEWNEEFKFSVRDPQTQVLEFSVYDWEQVGNPEKMGMNVLALKEMVPDEHKAFTLELRKTLDGGEDGQPPDKYRGKLEVELLYKPFTEEEMPKGFEETQAVQKAPEGTPAAGGMLVVIVHSAEDVEGKHHTNPYVRIYFKGEERKTKHVKKNRDPRWNEEFTFMLEEPPVREKLHVEVLSTSSRIGLLHPKETLGYVDIPVVDVVNNKRMNQKFHLIDSKNGKIQIELEWRTAS

SEQ ID NO: 4365 - protein, 862 aa, Arabidopsis thaliana
MGAIAGEELKKMEKTQVHVAREEKILVLVRLRPLNEKEILANEAADWECINDTTVLYRNTLREGSTFPSAYSFDRVYRGECPTRQVYEDGPKEVALSVVKGINSSIFAYGQTSSGKTYTMSGITEFAVADIFDYIFKHEDRAFVVKFSAIEIYNEAIRDLLSPDSTPLRLRDDPEKGAAVEKATEETLRDWNHLKELISVCEAQRKIGETSLNERSSRSHQIIKLTVESSAREFLGKENSTTLMASVNFIDLAGSERASQALSAGARLKEGCHINRSLLTLGTVIRKLSNGRQGHINYRDSKLTRILQPCLGGNARTAIVCTLSPARSHVEQTRNTLLFACCAKEVTTKAQINVVMSDKALVKQLQRELARLESELRNPAPATSSCDCGVTLRKKDLQIQKMEKQLAEMTKQRDIAQSRLEDFMKMVEHDASSKAGTPHFRNRTNKWEDGSVSEISGVVDPDRTSFISDGTSTPLSTARAHVRSHSDDDLEEEMSPRHSGDQSEEYCKEVQCIEMEESTRDINNDSEERTDAETLLGHNAEANGETGSAQHRIPSSVRSVRRRKSWSRGDTMTGTSTPPDALETDYRGRPEGHGFAFPDLEFGSGGKLLRNDSMTSRGSDSTEAHSIGTPLVGEEGGITSIRSFVEGLKEMVSDPENSGKMRKDIGVDAMEEEVSGTMTNWSEEFERQREQILGLWQTCHVSLVHRTYFFLLFTGDQADSIYIGVELRRLSFMKESFSQGNHAFERGQTLTIASSLKALHRERRMLSKLVGKRFTGEERKRLYQKFGIAVNSKRRRLQLANQLWSKPNDITHAVESAAVVAKLVRFVEQGRAMKEMFGLSFTPPLPTTRRSLNWRKSMATLF

SEQ ID NO: 4366 - protein, 637 aa, Arabidopsis thaliana
MSGPLDRFARPSFTTGFEGFLSSDEKKERKSDFENSEDERRTRIGSLKKKAINASTKFKHSLKKKSGRRKSDGRVSSVSIEDVRDVEELQAVDAFRQSLLMDELLPDRHDDYHMMLRFLKARKFDVEKAKQMWADMIQWRKEFGTDTIIQDFDFEEINEVLKHYPQCYHGVDKEGRPIYIERLGKVDPNRLMQVTSMDRYVRYHVKEFERSFMIKFPSCTISAKRHIDSSTTILDVQGVGLKNFNKSARDLITRLQKIDGDNYPETLHQMFIINAGPGFRLLWNTVKSFLDPKTSAKIHVLGYKYLSKLLEVIDVNELPEFLGGACTCADQGGCMLSDKGPWKNPEIVKMVLHGGAHRARQVVKVLNSEGKVIAYAKPSYTWIKGSDTSTAESGSDAEDIGSPKAIKSFSHLRLTPVREEAKIAGETSLAGSFPGYDEYVPMVDKAVDATWKVKPAIQRVASRGALMSPTVPKDHEGIKARVLVMFMAFLMAVFTFFRTVTKKLPATTTSSPAETQGNAIELGSNGEGVKEECRPPSPVPDLTETDLLNCVTKKLTELEGKIGTLQSKPNEMPYEKEELLNAAVCRVDALEAELIATKKALYEALMRQEELLAYIDRQEEAQFQKMKKKKKKHLFCF

SEQ ID NO: 4367 - protein, 304 aa, Arabidopsis thaliana
MEAAITQRIQYPSWVDCRKVECKPQRGSLRYSQQVKVDRRFRGLSLARLQPERRNDQRRAVSPAVSCSDNNSSGALLETGSVYPFDEDILKRKAEEVKPYLNGRSMYLVGMMGSGKTTVGKLMSKVLGYTFFDCDTLIEQAMNGTSVAEIFVHHGENFFRGKETDALKKLSSRYQVVVSTGGGAVIRPINWKYMHKGISIWLDVPLEALAHRIAAVGTDSRPLLHDESGDAYSVAFKRLSAIWDERGEAYTNANARVSLENIAAKRGYKNVSDLTPTEIAIEAFEQVLSFLEKEETMEIPDGDL

SEQ ID NO: 4368 - protein, 338 aa, Arabidopsis thaliana
MSSGNDKIKQVLHIEDLMSYRLLSVDKDELVTSPCLKERNYLGLSDCSSVDSSTIPNVVGKSNLNFKATELRLGLPESQSPERETDFGLLSPRTPDEKLLFPLLPSKDNGSATTGHKNVVSGNKRGFADTWDEFSGVKGSVRPGGGINMMLSPKVKDVSKSIQEERSHAKGGLNNAPAAKAQVVGWPPIRSYRKNTMASSTSKNTDEVDGKPGLGVLFVKVSMDGAPYLRKVDLRTYTSYQQLSSALEKMFSCFTLGQCGLHGAQGRERMSEIKLKDLLHGSEFVLTYEDKDGDWMLVGDVPWEIFTETCQKLKIMKGSDSIGLAPGAVEKSKNKERV

SEQ ID NO: 4369 - protein, 189 aa, Arabidopsis thaliana
MENIEYLNEIQAVAGKLIHSYGVPVMITLFLRWLASIVAVFLMILDQTKWKYSNNIMASLLAPYLFSSLPIVIFQVLRNGVGKWIALLTVILRLFLPNHFHESLEIPGATILLIVVTPSDIGAIFRDDLRYTGGDVCLLTSFYLINKHTKACGGIKNSFTQKDKVTYSICLWILFVYPILSSFAALFYL

SEQ ID NO: 4370 - protein, 707 aa, Arabidopsis thaliana
MGFEDKKMLRQRHKRSKSCTVPEKKKLEDENSIDSSLDASQRLKLDLPRCGDKSFEMKKDLSPDVKFKSSLKQEIQELEKRLQNQFDVRGALEKALGYKTPSRDIKGDSTPKPPTELIKEIAVLELEVSHLEQYLLSLYRKAFDQQTSSVSPPTSKQQSSCSPKSTLRGKRLDFSRTPESRCFSFDNRLKSPRLVEKELESPNLRCRQESLATQPRCFSFDNRLKEPSSAGRQCNQEVSRIDSRSFSFDNRVKEPGSAARHFNQEDSRIDSQCVSFDNRVKEPVSGVRQFDQESSRIDSRCFSFDNRLKDQCFIEKEDIDSCVRRCQSSLNQRSTFNNRISPPEDSVFACHSQPLSIHEYIQNGSNDASLAEHMGTRISDHIFMTPNKLSEEMIKCASAIYSKLADPPSINHGFSSPSSSPSSTSEFSPQDQYDMWSPSFRKNSSFDDQFEFSGPYSSMIEVSHIHRNRKRRDLDLMNRNFSLLLKQLESVDPRKLTHQEKLAFWINVHNALVMHTFLANGIPQNNGKRFLLLSKPAYKIGGRMVSLEAIQSYILRIKMPRPGQWLKLLLIPKKFRTGDEHQEYSLEHSEPLLYFALCSGNHSDPAIRVFTPKGIYQELETAKEEYIRATFGVKKDQKLVLPKIIESFSKDSGLGQAALMEMIQECLPETMKKTIKKLNSGRSRKSIVEWTPHNFVFRYLIARELVR

SEQ ID NO: 4371 - protein, 71 aa, Arabidopsis thaliana
MQTVVASDNNYVMIKVQGHGAEHSISYWFWKLKKSKMVKVKSRMETRAMRMKEKTQVIENKIIHFFFRELF

SEQ ID NO: 4372 - protein, 494 aa, Arabidopsis thaliana
MSACLCLVFLFFSIVAEATYSPGGFHHLSSLRLKKKVSKSKHELPFETRYFPQNLDHFSFTPDSYKVFHQKYLINNRFWRKGGPIFVYTGNEGDIDWFASNTGFMLDIAPKFRALLVFIEHRFYGESTPFGKKSHKSAETLGYLNSQQALADYAILIRSLKQNLSSEASPVVVFGGSYGGMLAAWFRLKYPHITIGALASSAPILHFDNIVPLTSFYDAISQDFKDASINCFKVIKRSWEELEAVSTMKNGLQELSKKFRTCKGLHSQYSARDWLSGAFVYTAMVNYPTAANFMAPLPGYPVEQMCKIIDGFPRGSSNLDRAFAAASLYYNYSGSEKCFEMEQQTDDHGLDGWQYQACTEMVMPMSCSNQSMLPPYENDSEAFQEQCMTRYGVKPRPHWITTEFGGMRIETVLKRFGSNIIFSNGMQDPWSRGGVLKNISSSIVALVTKKGAHHADLRAATKDDPEWLKEQRRQEVAIIEKWISEYYRDLREEQ

SEQ ID NO: 4373 - protein, 152 aa, Arabidopsis thaliana
MSGTVTMHSVFVYGSLMADDVVRLLLNRIPQTASATLPDFHRFSIKGRVYPAIIPAKSDKVSGKVLFGITDDELNVLDEFEDVEYERENVQVLLTDSSDEKLQTKTYVWAKKDDPDLYGTWDFEEWKQLHMEGFLKMTKEFAEELNLPKSEI

SEQ ID NO: 4374 - protein, 407 aa, Arabidopsis thaliana
MQRSQDQRISLCELKEHIVKKTGVERSRRYFYYLGRFLSQKLTKSEFDKTCLRLLGRENLSLHNQLIRSILRNATVAKSPPPDHEAGHSTKANAFQSRGDGLEQSGTLIPNHSQHEPVWSNGVLPISPRKVRSGMQNRKSRDRPSPLGSNGKVEHMLHQPVCREDNRGSVGMENGDYQRSGRYVADEKDGEFLRPVEKPRIPNKEKIAAVSMRDDQNQEEQARVNLSMSPLIAPLGIPFCSASVGGSPRTIPVSTNAELISCYDSGGLPDIEMLRKRMENIAVAQGLEGVSMECAKTLNNMLDVYLKKLINSCFDLVGARSTNGDPGKQRIGKQQSQNKIVNGVWPTNSLKIQTPNGSSDIRQDHHSVSMLDFRTAMELNPRQLGEDWPTLRERISLRSFEEQDFEV

SEQ ID NO: 4375 - protein, 690 aa, Arabidopsis thaliana
MAPRFDFSDLWAKETRRGTPVVVKMENPNYSIVEVEEPDSAFQPMEKSRGKNAKQVTWVLLLKAHKAVGCLTWVATVFWSLLGSVKRRLSFTHPLGSERLGRDGWLFSAIKLFLVASLAILAFELVAYYRGWHYFKNPNLHIPTSKLEIQSLLHLFYVGWLSLRADYIAPPIKALSKFCIVLFLVQSVDRLILCLGCLWIKFKKIKPRIDEEHFRNDDFEGSGSEYPMVLVQIPMCNEREVYEQSISAVCQLDWPKDRLLVQVLDDSDDESIQELIRDEVTKWSQKGVNIIYRHRLVRTGYKAGNLKSAMSCDYVEAYEFVAIFDADFQPNSDFLKLTVPHFKEKPELGLVQARWAFVNKDENLLTRLQNINLCFHFEVEQQVNGVFLNFFGFNGTAGVWRIKALEESGGWLERTTVEDMDIAVRAHLHGWKFIYLNDVKVLCEVPESYEAYKKQQHRWHSGPMQLFRLCLRSILTSKIAMWKKANLILLFFLLRKLILPFYSFTLFCVILPITMFVPEAELPIWVICYVPIFMSLLNILPAPKSFPFIVPYLLFENTMSVTKFNAMVSGLFQLGSSYEWIVTKKAGRSSESDLLALTDKESEKMPNQILRGVSDSELLEISQVEEQKKQPVSVKKTNKIFHKELALAFLLLTAAVRSLLASQGVHFYFLLFQGLTFLLVGLDLIGEQMS

SEQ ID NO: 4376 - protein, 672 aa, Arabidopsis thaliana
MHEVGLFVDLNSFTQLILTLFFVSIGLLYFVKRTAAKYFEVGGGSGGFDRDHRRDFMVSDTAECSVCGKATTKKCSRCKSVRYCSAACQTSDWKSGHKLKCKGFRSTDSSPVRRDDIDFEASLFGNRSASKKTRIALVPQQSQSKATLKPTDVLFPYESFVRYYNWDRPIMAPCGLTNCGNSCFANVVLQCLSWTRPLVAYLLERGHKRECRRNDWCFLCEFENHLDRANYSRFPFSPMNIISRLPNIGGNLGYGRQEDAHELMRFAIDMMQSVCLDEFGGEKVVPPRAQETTLIQYIFGGLLQSQVQCTACSNVSDQYENMMDLTVEIHGDAVSLEECLDQFTAKEWLQGDNLYKCDRCDDYVKACKRLSIRCAPNILTIALKRFQGGRFGKLNKRISFPETFDLGPYMSGGGEGSDVYKLYAVIVHLDMLNASFFGHYICYVKDFRGNWYRIDDSEVEKVELEDVLSQRAYMLLYSRVQPRPSNLRSEESQDEKKTDTLNTESNQDGSVESSGVGTNDTSVSSLCNGIISHSEDPEYEKESSLSASVPVSEEGKEVDVKVDTVDSESNRSIDMEHDSGTDHQEEEANGKEDPTVENLAVDSSCLDITTPSPSAATEFIPQENERSDTESKPLEKEHSDTESNKPLEKEHLDSESKPLEKEHSDTEMIDAQ

SEQ ID NO: 4377 - protein, 210 aa, Arabidopsis thaliana
MICRFSKVEMGKCSANSWSWNCDSRLFTIAFGLHKDTNCMLCLWLCFVCHCYSFMEIYVLSSSPVVGKSLFAGNESFFGVCGFAVASCLDMLSSKTLEVPLRDISVAYRSSTYTLVAEDIVAKTALSLNNALLLAWNEDSLVLQLFMDSQFSVKSFKLLEVTVELGRILLVLSFLHLRFIPLFFALFSYNAFVFAVLSVFSDVFYSCNGD

SEQ ID NO: 4378 - protein, 240 aa, Arabidopsis thaliana
MLCFKGSVKRKKQSGSVPVYLNVYDLTPMNAYGYWLGLGVFHSGVEVHGVEYAFGAHESSSTGIFEVEPKKCPGFTFRKSILVGKTDLVAKEVRVFMEKLAEEYQGNKYHLITRNCNHFCNEVCLKLAQKSIPRWVNRLARLGVLCNCVLPPRLNEAKVRRVGKGELSESEKKKLRNRSRSDPLLSSSPSSSTPDNHRSHIRAKSSGNHPSSSSSSSSGSKKNRRPKAQDQKSPSVSIKT

SEQ ID NO: 4379 - protein, 103 aa, Arabidopsis thaliana
MMHALLFLLSQNIFLRLYALRQKIRLFRNVFEKAHVVVFIYLLLRPRGLSKAQTNLVIDLNLASNACVCACFLHCGLVCGFCLCLPMHVFVIFYSLSNGRYNK

SEQ ID NO: 4380 - protein, 163 aa, Arabidopsis thaliana
MAETKKMIILKSSDGESFEVEEAVAVESQTIKHMIEDDCVDNGIPLPNVTGAILAKVIEYCKKHVEAAAEAGGDKDFYGSTENHELKTWDNDFVKVDHPTLFDLLRAANYLNISGLLDLTCKAVADQMRGKTPAQMREHFNIKNDYTPEEEAEVRNENRWAFE

SEQ ID NO: 4381 - protein, 416 aa, Arabidopsis thaliana
MIYTAIDNFYLSDEQLKASPSRKDGIDETTEISLRIYGCDLIQEGGILLKLPQAVMATGQVLFQRFYCKKSLAKFDVKIVAASCVWLASKLEENPKKARQVIIVFHRMECRRENLPLEHLDMYAKKFSELKVELSRTERHILKEMGFVCHVEHPHKFISNYLATLETPPELRQEAWNLANDSLRTTLCVRFRSEVVACGVVYAAARRFQVPLPENPPWWKAFDADKSSIDEVCRVLAHLYSLPKAQYISVCKDGKPFTFSSRSGNSQGQSATKDLLPGAGEAVDTKCTAGSANNDLKDGMVTTPHEKATDSKKSGTESNSQPIVGDSSYERSKVGDRERESDREKERGRERDRGRSHRGRDSDRDSDRERDKLKDRSHHRSRDRLKDSGGHSDKSRHHSSRDRDYRDSSKDRRRHH

SEQ ID NO: 4382 - protein, 1020 aa, Arabidopsis thaliana
MQIICSMIFLLVMMVMKVSGFSDFEALLELKKGFQGDPSRKVLTSWDAKALSSDRCPLNWYGVTCSSGGVTSIDLNGFGLLGSFSFPVIVGLRMLQNLSIANNQFSGTLSNIGSLTSLKYLDVSGNLFHGALPSGIENLRNLEFVNLSGNNNLGGVIPSGFGSLAKLKYLDLQGNSFSGEVMSLFSQLISVEYVDISRNNFSGSLDLGLAKSSFVSSIRHLNVSGNSLVGELFAHDGIPFFDSLEVFDASSNQLSGSVPVFSFVVSLKILRLQDNQLSASLPPGLLQESSTILTDLDLSLNQLEGPIGSITSSTLEKLNLSSNRLSGSLPLKVGHCAIIDLSNNKISGELSRIQNWGDSVEIIRLSSNSLTGTLPGQTSQFLRLTSLKAANNSLQGVLPFILGTYPELKEIDLSHNQLSGVIPSNLFISAKLTELNLSNNNFSGSLPLQDASTVGNLSLTNIGLSHNSLGGVLSEELTRFHNLISLDLSYNNFEGNIPDGLPDSLKMFTVSANNLSGNVPENLRRFPDSAFHPGNALLNVPISLPKDKTDITLRKHGYHMKTSVKAALIIGLVVGTALLALVCVMFHFMLRKQHDEEKSDVTGEKSIVPKTEPSSSNVIAAKNSVQENESSSSTTSTPSIKAKLPVSSSRFSQYSDSENSSPFLKEPNEELHSESRKDEILSSQVSSSTPSLPKIQNSPDNPTSRQTSMRLDGNLYIFDSSLKLTAEELSRAPAEAIGRSCHGTLYRAVLNSDSVLAVKWLREGTAKGKKEFAREIKKLGNINHPNLVSLQAYYWGPKEHEKLIISRYMDAPCLAFYLQEAGQLNLPPLLLENRLKITLDIASCLSYLHNGEAIPHGNLKSTNVLLKPPELTAHLTDYSLHRLITPEATSEQVLNAAALGYCPPEFASSSKPYPSLKSDVYAFGVILLELLTGKVSGDIVCSDPGVVELTEWVLLLVGQNRATECFDPSIVGSQGSRNPFGVLTDVLQVALSCISPAPERPDMKLVSQELSRIVLKRTAI

SEQ ID NO: 4383 - protein, 851 aa, Arabidopsis thaliana
MDVHLVEENVSMGNHEIGDEGDVEPSDCSGQNNMDNSLGVQDEIGIAEPCVGMEFNSEKEAKSFYDEYSRQLGFTSKLLPRTDGSVSVREFVCSSSSKRSKRRLSESCDAMVRIELQGHEKWVVTKFVKEHTHGLASSNMLHCLRPRRHFANSEKSSYQEGVNVPSGMMYVSMDANSRGARNASMATNTKRTIGRDAHNLLEYFKRMQAENPGFFYAVQLDEDNQMSNVFWADSRSRVAYTHFGDTVTLDTRYRCNQFRVPFAPFTGVNHHGQAILFGCALILDESDTSFIWLFKTFLTAMRDQPPVSLVTDQDRAIQIAAGQVFPGARHCINKWDVLREGQEKLAHVCLAYPSFQVELYNCINFTETIEEFESSWSSVIDKYDLGRHEWLNSLYNARAQWVPVYFRDSFFAAVFPSQGYSGSFFDGYVNQQTTLPMFFRLYERAMESWFEMEIEADLDTVNTPPVLKTPSPMENQAANLFTRKIFGKFQEELVETFAHTANRIEDDGTTSTFRVANFENDNKAYIVTFCYPEMRANCSCQMFEHSGILCRHVLTVFTVTNILTLPPHYILRRWTRNAKSMVELDEHVSENGHDSSIHRYNHLCREAIKYAEEGAITAEAYNIALGQLREGGKKVSVVRKRIGRAAPPSSHGGGIGSGDKTSLSAADTTPLLWPRQDEMIRRFNLNDGGARAQSVSDLNLPRMAPVSLHRDDTAPENMVALPCLKSLTWGMESKNTMPGGRVAVINLKLHDYRKFPSADMDVKFQLSSVTLEPMLRSMAYISEQLSSPANRVAVINLKLQDTETTTGESEVKFQVSRDTLGAMLRSMAYIREQLSIVGELQTESQAKKQRK

SEQ ID NO: 4384 - protein, 650 aa, Arabidopsis thaliana
MGVLLREALRSMCVNNQWSYAVFWKIGCQNSSLLIWEECYNETESSSNPRRLCGLGVDTQGNEKVQLLTNRMMLNNRIILVGEGLVGRAAFTGHHQWILANSFNRDVHPPEVINEMLLQFSAGIQTVAVFPVVPHGVVQLGSSLPIMENLGFVNDVKGLILQLGCVPGALLSENYRTYEPAADFIGVPVSRIIPSQGHKILQSSAFVAETSKQHFNSTGSSDHQMVEESPCNLVDEHEGGWQSTTGFLTAGEVAVPSNPDAWLNQNFSCMSNVDAAEQQQIPCEDISSKRSLGSDDLFDMLGLDDKNKGCDNSWGVSQMRTEVLTRELSDFRIIQEMDPEFGSSGYELSGTDHLLDAVVSGACSSTKQISDETSESCKTTLTKVSNSSVTTPSHSSPQGSQLFEKKHGQPLGPSSVYGSQISSWVEQAHSLKREGSPRMVNKNETAKPANNRKRLKPGENPRPRPKDRQMIQDRVKELREIIPNGAKCSIDALLERTIKHMLFLQNVSKHSDKLKQTGESKIMKEDGGGATWAFEVGSKSMVCPIVVEDINPPRIFQVEMLCEQRGFFLEIADWIRSLGLTILKGVIETRVDKIWARFTVEASRDVTRMEIFMQLVNILEQTMKCGGNSKTILDGIKATMPLPVTGGCSM

SEQ ID NO: 4385 - protein, 258 aa, Arabidopsis thaliana
MVVVFLSLIVVIWVASFFKIFFRATSISRATILDDGKKNVMFVIAHPDDESMFFSPTINYFTSTACNLHILCFSTGNADGMGSIRDQELHRACAVLKVPLQQLKILDHPNLQDGFGQLWSHDLLTEIIEEEVTNHYIHTIITFDNYGVWGHCNHRDVHRGVLKFLQTNSGRNVKAWELVSLNIFRKYCGPVDIWLSILSAKRHPSKVIIINKQPWKSFKAMAQHLSQWVWFRKLFVLFSSYTYVNTLDRINPESNELL

SEQ ID NO: 4386 - protein, 506 aa, Arabidopsis thaliana
MTRILVQRGSSGSSSNSSRPSSSSSSSSGSETQINNNIPVPPVTIDEEITDEKQEEVTVVEKAECSDAKDVAVDSDEPADREDDEGLVVAENVHVQSEGIDCDSPVSGGSNSDSPPVPAPPPKPSSTVNPGSNRSVLGSFGALRIGPTRRAAGPRSLVSSRSSPTGSHPSSPRSHSENEGYNSSDEHMPCYVPSHPGSGLEREHQFEAEIRYSKGFEIRRMLEDGNCLFRAVADQVYGDSEAYDLARQMCMDYMEQERDHFSQFITEGFTSYLKRKRRDKVYGNNVEIQALAEMYNRPIHIYSYSTEPINIFQGNYSTDTPPIRLSYHHGNHYNSLVDPHRLTVGAGLGFSSLSGRHVDKEQVKAAIKAQQEHQIDNALLAEGRFYSDLELTEKEIERSVMEASRAEYLMEWSKPRIGPKESSTSNAETSSSGATGPSGSDSKPAEAVKEKTVLSSSIEMVLSMGFSYAQAMEAYSIFGDDVDSMVCYVLETSCGGNNRRKGKATE

SEQ ID NO: 4387 - protein, 52 aa, Arabidopsis thaliana
MTTSFPGSVTTCKKTNNLSVQRAFRVTCMQTEKPLEELYNVKVERKVSKKRL

SEQ ID NO: 4388 - protein, 190 aa, Arabidopsis thaliana
MKNGNRKTTPETEKSHRRKLSEKAMSFHGRGTTPLSNPGELRRPKTLPELFSTGQSITVPETVSLPPRLTKLLLNVTVQGSLGAVQIIISPESTVSDLIDAAVRQYVKEARRPFLPESEPSRFDLHYSQFSLESIVRDEKLISLGSRNFFLCGRKETGGFIGCGLSSESCSKEAEKVAKTGFHWLKFMGF

SEQ ID NO: 4389 - protein, 839 aa, Arabidopsis thaliana
MAIAGLQNILVIDSSFRRDSEVQATRQRENEGRSSVRASSLLQMWRELEDDHVMGHARERDGERRSVSSPSNTMRGNGCDSNISAHDIVRDSVNLGENELGGWSPTQSHVGSHNSSEDLGPFQSEHFSDLGMGERERVRQIFREWTSSGTGQHTDSASQATNSSRAEWLGETEQERVRIIREMVQMNSQQRPALGDLREEQPIEGANQIERVLDGIVVNPNSIQNEHARRGIRKLCGRQVWVDMLKMAEMERQRELEGLMQHHAVSNFAHRNRIQALLRGRFLRNGDNDDKEKPTSSAATELGFLRERHTVSELREEFISRLDRSASGQASSSHSETSSNAETDHNRGEQNDLNCLDSINDADGGSDQNGREADNQSSLDEITNSGRCCSRSTSLEERTARVEGWQRSEIDDFSQRRNDTEVDLNATGCSSSSIHGDEIRYGCQLRETIEIPYEQSLQISEEIATMGPINRTTNFQENLGESINLTVTLEEQTVEQMENEESDWQLINGATSAWRDDAEEEADTDVPENFPNQLSQLSSVDEDREANILGELTEMQPDDDAASLQSTIQDWSEEHSDQDTVSMGRATTFFPPDDGNENNMELRELSSRRRVSNLLQSGFRENLSQLIQSYMDRRSQNPVDWEEAETYSDHTIVGEDTEQQDDAQSGGQELDAVESPPLTLPSPVIPIQPRWDHDRSHSNWPAHDLHQGIGMDWDSINDLRVDMGRIQQRMDNLQRMLEACMEMQLELQRSIRQEVSAAMHRSTDQPGPSKDTASYESKWEYVRKGICCVCCESNIDSLLYRCGHMNTCEKCAKKLVEAGGKCPMCQAPVIEVVRAYSIL

SEQ ID NO: 4390 - protein, 166 aa, Arabidopsis thaliana
MEATETVLCTLLAVDLTDYCYRVCSRCQRVLPSDNNGFASSSFCKFCKSKEPKLLYRILMSIATDASVKTVICFDRAATVLFGCSADEFFHFTKLNPLAASMVNQVFDGEMLRMTLTRPQNRNAQHMRVASVVPLRSGVQPAIVTLRQICTKNASLGNFSTTNHSS

SEQ ID NO: 4391 - protein, 737 aa, Arabidopsis thaliana
MAFGSENESETKMEGWLYIIRSNRFGLHFSRKRYFVLGDHLLKSFKSISDSKTKNAGRSAVIDSCIRVTDNGRENVHRKAFFIFTLYNTSNHNDQLKLGASSPEDAARWINLIKEAALKGAPFPGDVFNCSRSRWDSLRLSSSVRDHHSNSIDWTLRSSARVDPVTTDVVAPSPWTIFGCQNGLRLFKEAKERDSLGRWDDHPAIMAVGVVDGTSETIFQTLLSLGPSRSEWDFCFYQGSVVEHLDGHTDIIHKQLYSDWLPWGMKRRDFSLRRYWRREDDGTYVILYHSVFHKKCPPQKGYVRACLKSGGYVISPIDNGKQSVVKHMLAVDWKSWRSYVKPSLARSITVKMLGRISALRELFRAKHGSFPPNLSSGELSRSARLTQNEDGVFGDSSLRENEMFKDTANEERDKFPSERSSLVDLDEFFDVPEPSDNDNLDDSWTSDFDLDTCCQESRQPKLNSATSLVKKLHDLAVQKRGYVDLHERAKEESSPHATCNPPCCYGTTLPTDPSCDLPCSWTTTDPSTFLIRGKTYLDDQKKVKAKGTLMEMVAADWLKSDKREDDLGSRPGGIVQKYAAKGGPEFFFIVNIQVPGSTTYSLVLYYMMSTPIEEHPLLVSFVNGDDAYRNSRFKLIPYISKGSWIVKQSVGKKACLIGQALEINYFRGKNYIELGVDIGSSTVARGVVSLVLGYLNKLVIEMAFLIQANTEEELPEYLLGTCRFNHLDASKAISIIP

SEQ ID NO: 4392 - protein, 434 aa, Arabidopsis thaliana
MYKNQLQELAQRSCFNLPSYTCIREGPDHAPRFKATVNFNGEIFESPQYCSTLRQAEHSAAEVALNALSNRGPSHSLAARILDETGVYKNLLQEIAQRVGAPLPRYTTFRSGLGHQPVFTGTVELAGITFTGDPAKNKKQAEKNAAMAAWSSLKQLAKETSSSMPEPENIDELEQVIIARALINYRIKENIGTGSSSSAPVPFAKKFFMQNLRPTSPQPSPATTSRILPFICPKQPSRSSRSSLAATSGIDRIMAAALESRSYQRPQQRFANPPYVPMRQFRSQCHGMAPPVTIRTAVPVFSAPPMPPPPCTNNTQLPSSVYVPSLMRTAPPVRIAPPVTIRTAVPVFASAPPVRIRTAVKPTVEAGETRISSVQEKESIPVLPDSLEIGVEGSTITITDCEKTASKETERAEFKDSSKGEPETARERLENLKI

SEQ ID NO: 4393 - protein, 511 aa, Arabidopsis thaliana
MEKNKRAIGFLLLVVLINGVMMTRSNGYEGEEEWGGAGGGEWGGAEGGGAWGGGGGGGGAWGGEGEGGGEWGGGGEGGGGGRRGWFMMRESRQVIKSEGGEMRVVLSPRGRIIEKPMHIGFLTMEPKTLFVPQYLDSSLLIFIRQGEATLGVICKDEFGERKLKAGDIYWIPAGSVFYLHNTGLGQRLHVICSIDPTQSLGFETFQPFYIGGGPSSVLAGFDPHTLTSAFNVSLPELQQMMMSQFRGPIVYVTEGPQPQPQSTVWTQFLGLRGEEKHKQLKKLLETKQGSPQDQQYSSGWSWRNIVRSILDLTEEKNKGSGSSECEDSYNIYDKKDKPSFDNKYGWSIALDYDDYKPLKHSGIGVYLVNLTAGAMMAPHMNPTATEYGIVLAGSGEIQVVFPNGTSAMNTRVSVGDVFWIPRYFAFCQIASRTGPFEFVGFTTSAHKNRPQFLVGSNSLLRTLNLTSLSIAFGVDEETMRRFIEAQREAVILPTPAAAPPHVGEMVSDRFV

SEQ ID NO: 4394 - protein, 464 aa, Arabidopsis thaliana
MLDLNLNADSPESTQYGGDSYLDRQTSDNSAGNRVEESGTSTSSVINADGDEDSCSTRAFTLSFDILKVGSSSGGDESPAASASVTKEFFPVSGDCGHLRDVEGSSSSRNWIDLSFDRIGDGETKLVTPVPTPAPVPAQVKKSRRGPRSRSSQYRGVTFYRRTGRWESHIWDCGKQVYLGGFDTAHAAARAYDRAAIKFRGVDADINFTLGDYEEDMKQVQNLSKEEFVHILRRQSTGFSRGSSKYRGVTLHKCGRWEARMGQFLGKKYIYLGLFDSEVEAARAYDKAAINTNGREAVTNFEMSSYQNEINSESNNSEIDLNLGISLSTGNAPKQNGRLFHFPSNTYETQRGVSLRIDNEYMGKPVNTPLPYGSSDHRLYWNGACPSYNNPAEGRATEKRSEAEGMMSNWGWQRPGQTSAVRPQPPGPQPPPLFSVAAASSGFSHFRPQPPNDNATRGYFYPHP

SEQ ID NO: 4395 - protein, 340 aa, Arabidopsis thaliana
MVFSSVSSFLDPPINWPQSANPNNHPHHHQLQENGSLVSGHHQVLSHHFPQNPNPNHHHVETAAATTVDPSSLNGQAAERARLAKNSQPPEGALKCPRCDSANTKFCYFNNYNLTQPRHFCKACRRYWTRGGALRNVPVGGGCRRNKKGKSGNSKSSSSSQNKQSTSMVNATSPTNTSNVQLQTNSQFPFLPTLQNLTQLGGIGLNLAAINGNNGGNGNTSSSFLNDLGFFHGGNTSGPVMGNNNENNLMTSLGSSSHFALFDRTMGLYNFPNEVNMGLSSIGATRVSQTAQVKMEDNHLGNISRPVSGLTSPGNQSNQYWTGQGLPGSSSNDHHHQHLM

SEQ ID NO: 4396 - protein, 972 aa, Arabidopsis thaliana
MIPELGRRPMHRGNEDSSFGDDYEKEIGVLLGEQQRRQVEADELERELNLYRSGSAPPTVDGSVSAAGGLFSGGGGAPFLEFGGGNKGNGFGGDDEEFRKDPAYLSYYYANMKLNPRLPPPLMSREDLRVAQRLKGSSNVLGGVGDRRKVNDSQSLFSMPPGFDQRKQHEFEVEKTSASSSEWDANGLIGLPGLGIGGKQKSFADIFQADMGHGHPVTKQPSRPASRNTFDENVDSKNNLSPSASQGIGAPSPYSYAAVLGSSLSRNGTPDPQAIARVPSPCLTPIGSGRVSSNDKRNTSNQSPFNGGLNESSDLVNALSGMNLSGSGGLDERGQAEQDVEKVRNYMFGLQGGHNEVNQHGFPNKSDQAQKATGLLRNSQLRGAQGSTYNDGGGVATQYQHLDSPNYCLNNYGLNPAVASMMANQLGTNNYSPVYENASAASAMGFSGMDSRLHGGGYVSSGQNLSESRNLGRFSNRMMGGGTGLQSHMADPMYHQYADSLDLLNDPSMDVNFMGNSYMNMLELQRAYLGAQKSQYGVPYKSGSPNSHTDYGSPTFGSYPGSPLAHHLLPNSLVSPCSPMRRGEVNMRYPSATRNYAGGVMGSWHMDASLDEGFGSSMLEEFKSNKTRGFELAEIAGHVVEFSSDQYGSRFIQQKLETATSDEKNMVYEEIMPHALALMTDVFGNYVIQKFFEHGLPPQRRELADKLFDNVLPLSLQMYGCRVIQKAIEVVDLDQKIKMVKELDGHVMRCVRDQNGNHVVQKCIECVPEENIEFIISTFFGNVVTLSTHPYGCRVIQRVLEHCHDPDTQSKVMDEIMSTISMLAQDQYGNYVIQHVLEHGKPDERTVIIKELAGKIVQMSQQKFASNVVEKCLTFGGPEEREFLVNEMLGTTDENEPLQAMMKDQFANYVVQKVLETCDDQQRELILGRIKVHLNALKKYTYGKHIVARVEKLVAAGERRMALQSLTQPQMA

SEQ ID NO: 4397 - protein, 262 aa, Arabidopsis thaliana
MDKRWSLQGMNALVTGGTKGIGEAVVEELSILGARVHTCARDETQLQERLREWQEKGFQVTTSICDVSLREQREKLMETVSSLFQGKLNILVNNVGTLMLKPTTEYTAEEFSFLMATNLDSAFHISQLAHPLLKASGSGSIVLMSSIAGVVHVGVGSIYGATKGAMNQLARNLACEWASDNIRTNAICPWLITTPLISDLLSVEEMKKEAEERTPMGRVGEANEVSPLVAFLCLPAASYITGQVICVDGGLTVNGFSYQPHA

SEQ ID NO: 4398 - protein, 415 aa, Arabidopsis thaliana
MASISETSDDGSNGGDPNQKPEEPHKNPQEGKEEENQNEKPKEDDHQEEEVENVPQIPPQMPLELIVSTIATLRRCHYPTLSLLSDSFRQVISSVDLFQTRSLIGSTEPVLYTLITFTSPNFEEPRWFILQRRNNTSLQLSLVTSLPPMFPGCTTVTIGHKIYVMGGLRSLNRRAKTVFVIDCRFHTWRYLQEMQVARSYAASAVIDGMIYVVGGSTKRSDDWVEVFNVETNTWENVPSVLSPYGRSKAPFNVHFVLDNKIYILDGNNRVAYDLRGRRWEDWGPAGNQLGYFWQVLYCVVDNLLYAVVPDHLHVTPIVVYDPREMGWRPVMGVDYLPNLVYSESRMTNFGGKLMILGCYQSQARFDYYGEVNVWCVEVALERREDGEIWGKVQSLSLVNKFRKSPVFVLSRTVTV

SEQ ID NO: 4399 - protein, 230 aa, Arabidopsis thaliana
MGFERTSSSLSLLSSSLPSSLQPSENTRAKFSLFYLLLLFFVLCVIATFTITPTSTSSPYNRNSNSGTLGNFYAKVRKLFIPLTLLRDLTISDCDGMSRLTGHAEMPCTPKEILSRRIGFSAHEDKDSTQLLVRSPLVGPCLAYDLDRVEEGKSTVVIKKTRKIGDRSKEAELRRILRGLGSSPPRCSSKCGRCTPCKPVHVPVPPGTPVTAEYYPEAWRCKCGNKLYMP

SEQ ID NO: 4400 - protein, 593 aa, Arabidopsis thaliana
MATEGKNPINMNSMSSSLARTGQWVFSQDIPTDVVVEVGEANFSLHKFMLVAKSNYIRKLIMESKDSDVTRINLSDIPGGPEIFEKAAKFCYGVNFEITVQNVAALHCAAEFLQMTDKYCDNNLAGRTQDFLSQVALSSLSGAIVVLKSCEILLPISRDLGIVRRCVDVVGAKACNEAMFPCRTPPNWWTEELCILDVDFFSDVVSSMKQRGVKPSSLASAIITYTEKSLRDLVRDHSGRGVKYSDPGDNESDERSQQRDLVQSIVSLLPSDKGLFPVNFLCSLLRCAVFLDTSLTCKNELEKRISVVLEHVSVDDLLIPSFTYDGERLLDLDSVRRIISAFVEKEKNVGVFNGGDFNRGVCSVSLQRVAKTVDSYLAEIATYGDLTISKFNAIANLVPKSARKSDDDLYRAIDIFLKAHPNLDEIEREKVCSSMDPLKLSYDARLHASQNKRLPVNIVLHALYYDQLKLRSGVAEQEERAVVVLPEALKTRSQLQADTTLAKENEALRSELMKMKMYVSDMQKNKNGAGASSSNSSSLVSSKKSKHTFFSSVSKKLGKLNPFKNGSKDTSHIDEDLGGVDITKPRRRRFSIS

SEQ ID NO: 4401 - protein, 380 aa, Arabidopsis thaliana
MEEIEGTNRAAVESCHRVLNLLHRSQQQDHVGFEKNLVSETREAVIRFKRVGSLLSSSVGHARFRRAKKLQSHVSQSLLLDPCQQRTTEVPSSSSQKTPVLRSGFQELSLRQPSDSLTLGTRSFSLNSNAKAPLLQLNQQTMPPSNYPTLFPVQQQQQQQQQQQQQEQQQQQQQQQQQFHERLQAHHLHQQQQLQKHQAELMLRKCNGGISLSFDNSSCTPTMSSTRSFVSSLSIDGSVANIEGKNSFHFGVPSSTDQNSLHSKRKCPLKGDEHGSLKCGSSSRCHCAKKRKHRVRRSIRVPAISNKVADIPPDDYSWRKYGQKPIKGSPYPRGYYKCSSMRGCPARKHVERCLEDPAMLIVTYEAEHNHPKLPSQAITT

SEQ ID NO: 4402 - protein, 855 aa, Arabidopsis thaliana
MVAAKENKFLTVAPFECAWSDDLKFREAGRGCVAFDAFAHNDVTVVFRENVGTQHYHYKKDNSPHYIVIIGSNRNRRLKIQVDGKSVVDEEASDLCRCSLEFQSYWISIYDGLISIGKGRYPFQNLVFKWQDPKPNCNVQYVGLSSWDKHVGYRNVSVFPVTHNHILLWKQVDCREVRGDESGDEKVVEEGTGYDYEQWGLGNFLESWQLSDTVFLVGEEEMDVPAHKVILQASGNFPLRSSDGDVIQLRGVSYPILHALLQYIYTGRTQILESELAPLRDLSSKFEVMSLVRQCEESIDHFKLSKTAFDSCRKVKLLCPISHPLSGFMFPSAFPVDVGKLVKLYSTGEYSDIKIYLSDHSLTFQSHKVILSLWSVAFAKMFTNGMSESHSSTIYLTDVSPEAFKAMMNFMYSGELNMEDTVNFGTELIHLLFLADRFGVVPLHQECCKMLLECLSEWVAVSSLLKLKEKRNEIPHSNYRVKRILILCHVYITCRDGVPFWKKDSVCSVLQVVSSISSCKLIEEMCKRKFSMHFDYCTTASLDFVLLDQTTFSDILESADLTVTSEEKILNAVLMWCMKAEESHSWGVIDEMMNYADPKSLFKERLQSLDDLLPHVRFSLLPYELLKRLENSNLSKEIPVFNRLLKEAASFLTSGLISPGNEPISRFQHRRSSFKELQYIRDGDSNGVLHFVGTSYGSHQWVNPVLAKKINITSSSPTSRFTDPKALASKAYAGTSFAGPRMEDGHISSWWVVDLGEEHQLMCNYYTFRQDGSRAFTRFWKFQGSMDGKTWTDLRVHEDDQTMCKAGQFASWPITAANALLPFRFFRLVLTGPTADTSTPWNFCICYLELYGYFR

SEQ ID NO: 4403 - protein, 56 aa, Arabidopsis thaliana
MNWVQRKIYLYNVTFGLYMLDWWERYLFNSLVLILMWFILYNGSRYFSELCKRHLS

SEQ ID NO: 4404 - protein, 775 aa, Arabidopsis thaliana
MEERRDDESSPTHQGSELAERVKLLSFESQGEALSKDSPRSVEQDCSPGQRASQHLWDTGILSEPIPNGFYSVVPDKRVKELYNRLPTPSELHALGEEGVRIEVILVDFQKDKKLAMLKQLITTLVSGSGTNPALVIKKIAGTVSDFYKRPTLESPSKLALEENAFLFENHGAQLLGQIKRGCCRARAILFKVLADTVGLESRLVVGLPSDGTVNCMDSNKHMSVIVVLNSVELLVDLIRFPGQLVPRSAKAIFMSHISPAGESDSAENDSCDSPLEPNSPLYERRDPESTEKDENLQFYRKLEGYPNASGSSLRSLMLRPSTAIERKLSNTSHSEPNVATVFWRRSRRKVIAEQRTASSSPEHPSMRRGRSMLSTGRNSFRDYTGEASSPSSSSTSEIRKTRRRSFRITPEIGDDIASAVREMYEKSKQNRLLQGREDENSSVIDNNVSGLHLDDELNSKKTMSLPSSPHAYRCQTFGRRGPSEFAVKDTWNKVVESSTLQNQPLLPYQEWDIDFSELTVGTRVGIGFFGEVFRGVWNGTDVAIKLFLEQDLTAENMEDFCNEISILSRVRHPNVVLFLGACTKPPRLSMITEYMELGSLYYLIHMSGQKKKLSWHRRLRMLRDICRGLMCIHRMKIVHRDLKSANCLVDKHWTVKICDFGLSRIMTDENMKDTSSAGTPEWMAPELIRNRPFTEKCDIFSLGVIMWELSTLRKPWEGVPPEKVVFAVAHEGSRLEIPDGPLSKLIADCWAEPEERPNCEEILRGLLDCEYTLC

SEQ ID NO: 4405 - protein, 361 aa, Arabidopsis thaliana
MGLKGYSVGEGGGEIVEVQGGHIIRATGRKDRHSKVFTSKGPRDRRVRLSAHTAIQFYDVQDRLGYDRPSKAVDWLIKKAKTAIDKLELGETTTTTTRQEPVNTKPESPTLVFQRENNDQTQFVAANLDPEDAMKTFFPATTTTNGGGGTNINFQNYPHQDDNNMVSRTTTPPPNLSQDLGLSLHPFQGNNNTVVVPETNNFTTTHFDTFGRISGWNHHDLTMTSSSSSEHQQQEQEERSNGGFMVNHHPHHHHHQPSMMTLLNSQQQQVFLGGQQQQQQRGTLQSSLFPHSFRSWDHHQTTSDHHHHQNQASSMFASSSQYGSHGMMMMQGLSFPNTTRLLHGEEATQPNSSSSPPNSHL

SEQ ID NO: 4406 - protein, 737 aa, Arabidopsis thaliana
MGSTSQEILKSFCFNTDWDYAVFWQLNHRGSRMVLTLEDAYYDHHGTNMHGAHDPLGLAVAKMSYHVYSLGEGIVGQVAVSGEHQWVFPENYNNCNSAFEFHNVWESQISAGIKTILVVAVGPCGVVQLGSLCKVNEDVNFVNHIRHLFLALRDPLADHAANLRQCNMNNSLCLPKMPSEGLHAEAFPDCSGEVDKAMDVEESNILTQYKTRRSDSMPYNTPSSCLVMEKAAQVVGGREVVQGSTCGSYSGVTFGFPVDLVGAKHENQVGTNIIRDAPHVGMTSGCKDSRDLDPNLHLYMKNHVLNDTSTSALAIEAERLITSQSYPRLDSTFQATSRTDKESSYHNEVFQLSENQGNKYIKETERMLGRNCESSQFDALISSGYTFAGSELLEALGSAFKQTNTGQEELLKSEHGSTMRPTDDMSHSQLTFDPGPENLLDAVVANVCQRDGNARDDMMSSRSVQSLLTNMELAEPSGQKKHNIVNPINSAMNQPPMAEVDTQQNSSDICGAFSSIGFSSTYPSSSSDQFQTSLDIPKKNKKRAKPGESSRPRPRDRQLIQDRIKELRELVPNGSKCSIDSLLERTIKHMLFLQNVTKHAEKLSKSANEKMQQKETGMQGSSCAVEVGGHLQVSSIIVENLNKQGMVLIEMLCEECGHFLEIANVIRSLDLVILRGFTETQGEKTWICFVTEVGSRITQFMKEIPKQIKSQNSKVMQRMDILWSLVQIFQPKANEKG

SEQ ID NO: 4407 - protein, 71 aa, Arabidopsis thaliana
MGGGMETNKNKFIEDWGSARENLEHNFRWTRRNFALIGIFGIALPIIVYKGIVKDFHMQDEDAGRPHRKFL

SEQ ID NO: 4408 - protein, 71 aa, Arabidopsis thaliana
MSQYSQNQSSGAYPTPPVSTGPYMTPPPLGYPTSDISHATVAPVETKSKGDGFLKGCLAAMCCCCVLDACF

SEQ ID NO: 4409 - protein, 310 aa, Arabidopsis thaliana
MATLNMAETLETLIANSQEVDYSYDPEEDDIDLSLLRLNSFGNSSDRRRANSSPPQFKSYGSFGSSSTTATTSPVKRPSPESKQGDEPRRKKLFIPRPEEEEDPNLMGYSKIPLPVVEFNPTQIRSPLYKRSLSDTFASPVGSTFGSGGSGYTRNSVAQETSPPSGNVPSLPPRPRMFRRSVSDLSPAPSSKSLLGSSRSNAIPEGDLANPESSDANKMLYIIKDGVRELDQWCNKLLKYGEAVSSGSVKQDDSPKAVDEVVQQEEQPKECKEGVKVNRLGEAFVVEINCPCGRNYQTLFSGRDCYYKLL

SEQ ID NO: 4410 - protein, 807 aa, Arabidopsis thaliana
MDDEDVEIDLLTKSSNVDVFCEASTSGNVAQCATVSELRNGMDFESKEAAYYFYREYARSVGFGITIKASRRSKRSGKFIDVKIACSRFGTKREKATAINPRSCPKTGCKAGLHMKRKEDEKWVIYNFVKEHNHEICPDDFYVSVRGKNKPAGALAIKKGLQLALEEEDLKLLLEHFMEMQDKQPGFFYAVDFDSDKRVRNVFWLDAKAKHDYCSFSDVVLFDTFYVRNGYRIPFAPFIGVSHHRQYVLLGCALIGEVSESTYSWLFRTWLKAVGGQAPGVMITDQDKLLSDIVVEVFPDVRHIFCLWSVLSKISEMLNPFVSQDDGFMESFGNCVASSWTDEHFERRWSNMIGKFELNENEWVQLLFRDRKKWVPHYFHGICLAGLSGPERSGSIASHFDKYMNSEATFKDFFELYMKFLQYRCDVEAKDDLEYQSKQPTLRSSLAFEKQLSLIYTDAAFKKFQAEVPGVVSCQLQKEREDGTTAIFRIEDFEERQNFFVALNNELLDACCSCHLFEYQGFLCKHAILVLQSADVSRVPSQYILKRWSKKGNNKEDKNDKCATIDNRMARFDDLCRRFVKLGVVASLSDEACKTALKLLEETVKHCVSMDNSSKFPSEPDKLMTGGSIGLENEGVLDCASKVSKKKKIQKKRKVYCGPEDATNRSEELRQETEQVSSRAPTFENCYIPQANMEEPELGSRATTLGVYYSTQQTNQGFPSISSIQNGYYGHPPTIQAMGNLHSIHERMSQYETQPSMQGAFQGQTGFRGSAIRGCYDIEETLHDMTMGSSQFQGSDSSHPSDHRLSN

SEQ ID NO: 4411 - protein, 537 aa, Arabidopsis thaliana
MANSKYEYVKSFEVEDEVMFPNLIIIRIDGRDFSRFSQVHKFEKPNDETSLNLMNSCASSVLVEYPDIVFAYGYSDEYSFVFKKASRFYQRRASKILSLVASFFAAVYVTKWKEFFPHTKLEYAPSFASKVVSCASVEVLQAYLAWRQHDCHISNQYDTCLWMLVKSGKTLSETQEILKDTQKQQRNELLFQQFGINYKMLPVLFRQGSCLFKTKVIFSIISFFYFLLEETVKHDENGKPVKRLRRRETLVHSENVAGRSFWNEHSSLHKDLGHFAKDIGKIEPDYVKSFQFESRLLPLTWVVVRIDGCHFHRFSEVHEFEKPNDEQALKLMNSCAVAVLEEFQDIAFAYGVSDEFSFVLKNKSELYKRQSSKIISAVVSFFTSTYMMRWGDFFPHKKLKYPPSFDGRAVCYPTSDILLDYLAWRQVDCHINNQYNTCFWMLVKSGKSKIQAQDYLKGTQTREKNELLSQQFGIEYNSLPVIFRMGSSVFRLKTQEGVTEENGEVSGKQVEAEVGVDYSNIIDQCFWQQHPHILSFS

SEQ ID NO: 4412 - protein, 409 aa, Arabidopsis thaliana
MSTKIKGELFPSRSLVSKKWTFLLCFGSFCFGILFTDRMWIIPESKDMPRPSVSTEAERLKLISEGCDPKTLYQKEVNRDPQALFGEVSKTHNAIQTLDKTISSLEMELAAARSAQESLVNGAPISNDMEKKQLPGKRRYLMVVGINTAFSSRKRRDSVRTTWMPSGEKRKKLEEEKGIIIRFVIGHSATAGGILDRSIEAEDKKHGDFLRLDHVEGYLELSGKTKTYFSTAVSKWDAEFYVKVDDDVHVNIATLGETLVRHRKKHRVYLGCMKSGPVLSQKGVRYHEPEYWKFGENGNKYFRHATGQLYAISRDLASYISLNQHVLHKYANEDVTLGAWFIGLDVTHIDDRRLCCGTPPDCEWKAQAGNICVASFDWTCSGICRSADRIKEVHKRCGEPENAIWKARF

SEQ ID NO: 4413 - protein, 489 aa, Arabidopsis thaliana
MTETGLILMWFPLIILGLFVLKWVLKRVNVWIYVSKLGEKKHYLPPGDLGWPVIGNMWSFLRAFKTSDPESFIQSYITRYGRTGIYKAHMFGYPCVLVTTPETCRRVLTDDDAFHIGWPKSTMKLIGRKSFVGISFEEHKRLRRLTSAPVNGPEALSVYIQFIEETVNTDLEKWSKMGEIEFLSHLRKLTFKVIMYIFLSSESEHVMDSLEREYTNLNYGVRAMGINLPGFAYHRALKARKKLVAAFQSIVTNRRNQRKQNISSNRKDMLDNLIDVKDENGRVLDDEEIIDLLLMYLNAGHESSGHLTMWATILMQEHPMILQKAKEEQERIVKKRAPGQKLTLKETREMVYLSQVIDETLRVITFSLTAFREAKSDVQMDGYIIPKGWKVLTWFRNVHLDPEIYPDPKKFDPSRWEGYTPKAGTFLPFGLGSHLCPGNDLAKLEISIFLHHFLLKYRVERSNPGCPVMFLPHNRPKDNCLARITRTMP

SEQ ID NO: 4414 - protein, 77 aa, Arabidopsis thaliana
MAASREFIICCFLTLLLCNFFMRVESGAAADVSRGGCGGGDGSLGDDNERCVEAVKEDDDDDVDDVYKVINKMRIYA

SEQ ID NO: 4415 - protein, 1124 aa, Arabidopsis thaliana
MGWWIFEFKKESKSMFVGVLFLLTLLVWTSESLNSDGQFLLELKNRGFQDSLNRLHNWNGIDETPCNWIGVNCSSQGSSSSSNSLVVTSLDLSSMNLSGIVSPSIGGLVNLVYLNLAYNALTGDIPREIGNCSKLEVMFLNNNQFGGSIPVEINKLSQLRSFNICNNKLSGPLPEEIGDLYNLEELVAYTNNLTGPLPRSLGNLNKLTTFRAGQNDFSGNIPTEIGKCLNLKLLGLAQNFISGELPKEIGMLVKLQEVILWQNKFSGFIPKDIGNLTSLETLALYGNSLVGPIPSEIGNMKSLKKLYLYQNQLNGTIPKELGKLSKVMEIDFSENLLSGEIPVELSKISELRLLYLFQNKLTGIIPNELSKLRNLAKLDLSINSLTGPIPPGFQNLTSMRQLQLFHNSLSGVIPQGLGLYSPLWVVDFSENQLSGKIPPFICQQSNLILLNLGSNRIFGNIPPGVLRCKSLLQLRVVGNRLTGQFPTELCKLVNLSAIELDQNRFSGPLPPEIGTCQKLQRLHLAANQFSSNLPNEISKLSNLVTFNVSSNSLTGPIPSEIANCKMLQRLDLSRNSFIGSLPPELGSLHQLEILRLSENRFSGNIPFTIGNLTHLTELQMGGNLFSGSIPPQLGLLSSLQIAMNLSYNDFSGEIPPEIGNLHLLMYLSLNNNHLSGEIPTTFENLSSLLGCNFSYNNLTGQLPHTQIFQNMTLTSFLGNKGLCGGHLRSCDPSHSSWPHISSLKAGSARRGRIIIIVSSVIGGISLLLIAIVVHFLRNPVEPTAPYVHDKEPFFQESDIYFVPKERFTVKDILEATKGFHDSYIVGRGACGTVYKAVMPSGKTIAVKKLESNREGNNNNSNNTDNSFRAEILTLGKIRHRNIVRLYSFCYHQGSNSNLLLYEYMSRGSLGELLHGGKSHSMDWPTRFAIALGAAEGLAYLHHDCKPRIIHRDIKSNNILIDENFEAHVGDFGLAKVIDMPLSKSVSAVAGSYGYIAPEYAYTMKVTEKCDIYSFGVVLLELLTGKAPVQPLEQGGDLATWTRNHIRDHSLTSEILDPYLTKVEDDVILNHMITVTKIAVLCTKSSPSDRPTMREVVLMLIESGERAGKVIVSTTCSDLPPPAPP

SEQ ID NO: 4416 - protein, 98 aa, Arabidopsis thaliana
MDTGRGEGKEANGCENKAIVSLNSSEIEDQIFEEEESESQCLLPPRKGGMSRSTDKIKRTVQWNDIKGDNLAEVLVYEPSEVSDTEDDDSDSCICTIM

SEQ ID NO: 4417 - protein, 380 aa, Arabidopsis thaliana
MSMDFSPLLTVLEGDFNKDNTSSATEIDTLENLDDTRQISKGKPPRHLTSSATRLQLAANADVDVCNLVMKSLDDKSEFLPVYRSGSCAEQGAKQFMEDEHICIDDLVNHLGAAIQCSSLGAFYGVFDGHGGTDAAHFVRKNILRFIVEDSSFPLCVKKAIKSAFLKADYEFADDSSLDISSGTTALTAFIFGRRLIIANAGDCRAVLGRRGRAIELSKDHKPNCTAEKVRIEKLGGVVYDGYLNGQLSVARAIGDWHMKGPKGSACPLSPEPELQETDLSEDDEFLIMGCDGLWDVMSSQCAVTIARKELMIHNDPERCSRELVREALKRNTCDNLTVIVVCFSPDPPQRIEIRMQSRVRRSISAEGLNLLKGVLDGYP

SEQ ID NO: 4418 - protein, 907 aa, Arabidopsis thaliana
MEMSLTDSDWDSSSDSGSSEHEEVEFSYGGRAQNIFSNLEETIGKIDEFLSFERGFMYGDIVRSATEPSGQSGRVINIDMFVNLESTHGKIMKEVDTKRLQKLRSISLSDYVINGPWVGRVDKIVERVSVTLDDGTNYEVLVDGQDKLVAIPPNLLEDSQYSYYPGQRVQVKLAHAPRSTTWLCGTWRGTQVMGTVCTVEAGLVYVDWVASIVMEGDRNLTAPQALQNPESLTLLPCVSHASWQLGDWCILPGSSHCDIAERQTPNVAAYNLNECHKTFQKGFNRNMQNSGLDELFVITKTKMKVAVMWQDGSCSLGVDSQQLLPVGAVNAHDFWPEQFVVEKETCNSKKWGVVKAVNAKEQTVKVQWTIQVEKEATGCVDEVMEEIVSAYELLEHPDFGFCFSDVVVKLLPEGKFDPNADTIVATEAKHLLTESDYSGAYFLSSIGVVTGFKNGSVKVKWANGSTSKVAPCEIWKMERSEYSNSSTVSSEGSVQDLSQKISQSDEASSNHQETGLVKLYSVGESCNENIPECSSFFLPKAAIGFITNLASSLFGYQGSTSVISSHSRCNDSEDQSDSEVLVQETAESYDNSETNSGEVDMTTTMVNIPIEGKGINKTLDSTLLENSRNQVRFRQFDMVNDCSDHHFLSSDKGLAQSQVTKSWVKKVQQEWSNLEANLPNTIYVRVCEERMDLLRAALVGAPGTPYHDGLFFFDIMLPPQYPHEPPMVHYHSGGMRLNPNLYESGRVCLSLLNTWSGSGTEVWNAGSSSILQLLLSFQALVLNEKPYFNEAGYDKQLGRAEGEKNSVSYNENAFLITCKSMISMLRKPPKHFEMLVKDHFTHRAQHVLAACKAYMEGVPVGSSANLQGNSTTNSTGFKIMLSKLYPKLLEAFSEIGVDCVQEIGPES

SEQ ID NO: 4419 - protein, 353 aa, Arabidopsis thaliana
MEIDLGANAFGIDFHPSTNLVAAGLIDGHLHLYRYDSDSSLVRERKVRAHKESCRAVRFIDDGQRIVTASADCSILATDVETGAQVAHLENAHEDAVNTLINVTETTIASGDDKGCVKIWDTRQRSCSHEFNAHEDYISGMTFASDSMKLVVTSGDGTLSVCNLRTSKVQSQSEFSEDELLSVVIMKNGRKVICGTQNGTLLLYSWGFFKDCSDRFVDLAPNSVDALLKLDEDRLITGCDNGIISLVGILPNRIIQPIGSHDYPIEDLALSHDKKFLGSTAHDSMLKLWNLEEILEGSNVNSGNASGAAEDSDSDNDGMDLDNDPSKSSKGSKRKTKSKANTLNATNNFFADL

SEQ ID NO: 4420 - protein, 1623 aa, Arabidopsis thaliana
MGFEFIEWYCKPVPNGVWTKQVANAFGAYTPCATDSFVLGISQLVLLVLCLYRIWLALKDHKVERFCLRSRLYNYFLALLAAYATAEPLFRLIMGISVLDFDGPGLPPFEAFGLGVKAFAWGAVMVMILMETKIYIRELRWYVRFAVIYALVGDMVLLNLVLSVKEYYSSYVLYLYTSEVGAQVLFGILLFMHLPNLDTYPGYMPVRSETVDDYEYEEISDGQQICPEKHANIFDKIFFSWMNPLMTLGSKRPLTEKDVWYLDTWDQTETLFTSFQHSWDKELQKPQPWLLRALNNSLGGRFWWGGFWKIGNDCSQFVGPLLLNQLLKSMQEDAPAWMGYIYAFSIFVGVVFGVLCEAQYFQNVMRVGYRLRSALIAAVFRKSLRLTNEGRRKFQTGKITNLMTTDAESLQQICQSLHTMWSAPFRIIIALILLYQQLGVASLIGALLLVLMFPLQTVIISKMQKLTKEGLQRTDKRIGLMNEVLAAMDTVKCYAWENSFQSKVQTVRDDELSWFRKSQLLGALNMFILNSIPVLVTIVSFGVFTLLGGDLTPARAFTSLSLFAVLRFPLFMLPNIITQVVNANVSLKRLEEVLATEERILLPNPPIEPGEPAISIRNGYFSWDSKGDRPTLSNINLDVPLGSLVAVVGSTGEGKTSLISAILGELPATSDAIVTLRGSVAYVPQVSWIFNATVRDNILFGSPFDREKYERAIDVTSLKHDLELLPGGDLTEIGERGVNISGGQKQRVSMARAVYSNSDVYIFDDPLSALDAHVGQQVFEKCIKRELGQKTRVLVTNQLHFLSQVDRIVLVHEGTVKEEGTYEELSSNGPLFQRLMENAGKVEEYSEENGEAEADQTAEQPVANGNTNGLQMDGSDDKKSKEGNKKGGKSVLIKQEERETGVVSWRVLKRYQDALGGAWVVMMLLLCYVLTEVFRVTSSTWLSEWTDAGTPKSHGPLFYNLIYALLSFGQVLVTLTNSYWLIMSSLYAAKKLHDNMLHSILRAPMSFFHTNPLGRIINRFAKDLGDIDRTVAVFVNMFMGQVSQLLSTVVLIGIVSTLSLWAIMPLLVLFYGAYLYYQNTAREVKRMDSISRSPVYAQFGEALNGLSTIRAYKAYDRMADINGRSMDNNIRFTLVNMGANRWLGIRLETLGGLMIWLTASFAVMQNGRAENQQAFASTMGLLLSYALNITSLLTGVLRLASLAENSLNAVERVGNYIEIPPEAPPVIENNRPPPGWPSSGSIKFEDVVLRYRPQLPPVLHGVSFFIHPTDKVGIVGRTGAGKSSLLNALFRIVEVEKGRILIDDCDVGKFGLMDLRKVLGIIPQSPVLFSGTVRFNLDPFGEHNDADLWESLERAHLKDTIRRNPLGLDAEVSEAGENFSVGQRQLLSLSRALLRRSKILVLDEATAAVDVRTDALIQKTIREEFKSCTMLIIAHRLNTIIDCDKILVLDSGRVQEFSSPENLLSNEGSSFSKMVQSTGAANAEYLRSLVLDNKRAKDDSHHLQGQRKWLASSRWAAAAQFALAASLTSSHNDLQSLEIEDDSSILKRTNDAVVTLRSVLEGKHDKEIAESLEEHNISREGWLSSLYRMVEGLAVMSRLARNRMQQPDYNFEGNTFDWDNVEM

SEQ ID NO: 4421 - protein, 694 aa, Arabidopsis thaliana
MGCAASRIDNEEKVLVCRQRKRLMKKLLGFRGEFADAQLAYLRALRNTGVTLRQFTESETLELENTSYGLSLPLPPSPPPTLPPSPPPPPPFSPDLRNPETSHDLADEEEEGENDGGNDGSGAAPPPPLPNSWNIWNPFESLELHSHPNGDNVVTQVELKKKQQIQQAEEEDWAETKSQFEEEDEQQEAGGTCLDLSVHQIEAVSGCNMKKPRRLKFKLGEVMDGNSSMTSCSGKDLEKTHVTDCRIRRTLEGIIRELDDYFLKASGCEKEIAVIVDINSRDTVDPFRYQETRRKRSSSAKVFSALSWSWSSKSLQLGKDATTSGTVEPCRPGAHCSTLEKLYTAEKKLYQLVRNKEIAKVEHERKSALLQKQDGETYDLSKMEKARLSLESLETEIQRLEDSITTTRSCLLNLINDELYPQLVALTSGLAQMWKTMLKCHQVQIHISQQLNHLPDYPSIDLSSEYKRQAVNELETEVTCWYNSFCKLVNSQREYVKTLCTWIQLTDRLSNEDNQRSSLPVAARKLCKEWQLVFEKLPDKVTSEAIKSFLMSIKSIIHQQAEEYNLRRKCNKLERRLEKELISLAEIERRLEGILAMEEEEVSSTSLGSKHPLSIKQAKIEALRKRVDIEKTKYLNSVEVSKRMTLDNLKSSLPNVFQMLTALANVFANGFESVNGQTGTDVSDTSQHSDESQP

SEQ ID NO: 4422 - protein, 1297 aa, Arabidopsis thaliana
MATTNAPPELASGNPCCLAWQGKYIGMKKRRDAFKEGVTLLQKAIENVNAEKSNLERKFGEMATDGDTKENGSTVKASLEKEISRLKFEIVSLQQKLERNLKEKSEETKLLQDQASGREKEINELRDLLKKETLRADSSEEEREHAFKELNKAKALIVKDEEIEQDIPEVKREISLVKNLLASERQKTESERKKAESEKKKADKYLSELEVLRNSAHKTSSDLLTLTSNLETVKKQLELEKQKTLKEKKRADMESAKARDQMKLAEDVSKKFEIVRARNEELKKEMESQTASSQVKFAENSEKLEEKIRLLEMNKKTAMDWKSRTDDLTQQLQEAQLVAEGLKKQVHELSLSQKSIKTHSISPQKVRDLEKAEMRLLKKKMKFERNCAKHSQTVAKFEKFRREFQCEELGRLKLEFGSLTNRMNLLDEYFSTDVEGTAGLGKATGCRKLLTLNSQKNRNGEKHSDARCKLVASSGYQEQACKLSAHLISKSGRGVSESVSGTISQLESPTGGSRKLPSSGVISSATSFSDGQLLASQGREQFSVTTSAEIAKDKPNIQPTKSSMLQKISDTSKNGNLCLVAENYLQRCQRDIHENSRKRKRMLEAVVSHKHLASGDKKKNLPIGEKMGTLQSMIVGTGSRPSEKEETLVPPDRQGGSSAIDITVSKKRRVSCKKKIIVQNSLEFNQSGKTPGNIAGKTTCLSTATGHDVKTLFSEDFAATDYMKLLELDNLEEENYYQMARESLLSPDLPQVDFLGCEIMNEDKNPARAIDLAASNSMYLRETILSSESPSLNTQNISVTVEMPPMLKPLHGHLLKHFIVFSNIEDQNSIIIIIHATNNCLQRCPSVTKEQWAVPAILSSLKMEENLLAQERACVFLSLLLHNFSMVHTTKTGNTLNVDSFSCLDSFSKHIRGVMADTEAGVMLSGFSEELLCLLQDLLSGQRVLFSVKSSETCESDLSIPVTLNGENVALVNKIALTDQLVAGSAILAAICTALDRIGYICEASFEILHKYSHEKTSVLLTILHVFAYIAGEKMVLSSEHGISIAVLKYIVMFLENKHFGTVEGSSRLHPGKNKCPFSDRSSSLEAMASKLMEILQEFTESNTLHKSLTGSLGSSHLEKTEFRPAHKDFQCVLTRDQSINLCDILSLVELIACYTAWDWTSANIVAPLLKMLGMPLPMNLSVAIVSLLGQLSSIGVDAGGYENEGISNLRVKLSAFLQCETTLKAGFAVQIATVSSLLKTLQLKFPIDFQDKTTMIPGSGDQSLSGSVNVVTKWLSLLSKEQRVFAFEFLQTNVVR

SEQ ID NO: 4423 - protein, 579 aa, Arabidopsis thaliana
MNLGAWGQRFIQAAASSESEDSALDLERNHHCNHLSLPSSSSPSPLQPFTLNIQHAESNAPYFSWPTLSRLNDTVEDRANYFGNLQKGVLPETVGRLPSGQQATTLLELMTIRAFHSKILRRFSLGTAVGFRISRGVLTNVPAILVFVARKVHRQWLNPMQCLPSALEGPGGVWCDVDVVEFQYYGAPAATPKEQVYNELVDGLRGSDPCIGSGSQVASQETYGTLGAIVKSRTGNHQVGFLTNRHVAVDLDYPSQKMFHPLPPSLGPGVYLGAVERATSFITDDQWYGIFAGTNPETFVRADGAFIPFAEDFNTSNVTTLIKGIGEIGDVHVIDLQSPIDSLIGKQVVKVGRSSGYTTGTIMAYALEYNDEKGICFLTDFLVIGENQQTFDLEGDSGSLILLTGPNGQKPRPVGIIWGGTANRGRLKLIAGQEPENWTSGVDLGRLLDLLELDLITSNHELEAAAAAREERNTSVTALDSTVSQSSPPDPVPSGDKQDESFEPFIPPEFHIEEAIKPTLEVEEHIFIAPISVNESTSAIKGQEIPKLDNLMALKNSSEEEVNISLHLGEPKLKKPKFF

SEQ ID NO: 4424 - protein, 288 aa, Arabidopsis thaliana
MARNSDNDMCKEERKRESFFKVLQRVDISSENMRALPYDFVRSFSNNELSRKMKIKARWGSSWEVEICKNPRFYFMEKSGWEKFVSDNALGASEFLTFTHKGNMRFTVNIFMQDGKEMLQPPQSMSFMASSRPPKREQGIPSLATTIAAESNGGGNYKRKLNFEKKKAEESHNSKRTDKVFSVQRESAGASSSSVAEFSMFIKKSYLIYMWFPKSVQSIHMPKQRTIFKIHHPNMKKSWNVVYVVSGTKSSFSAGWKGLAQEYPLAVGDTCKFSFIKQHELILFVSKP

SEQ ID NO: 4425 - protein, 403 aa, Arabidopsis thaliana
MASLGLSFPPAAKTPTYLASSSSTFFSNSSLSVRTSQFRSRNSVFACVKCDMPESLNVGNGNPSIPIINERTLPKFLESARMEKSVNRTNTRLKLFSGTANPALAQEIAWYMGLDLGKVNIKRFADGEIYVQLQESVRGCDVYLVQPTCTPTNENLMELLIMVDACRRASAKKVTAVIPYFGYARADRKTQGRESIAAKLVANLITEAGADRVLACDLHSGQSMGYFDIPVDHVYCQPVILDYLASKSIPSEDLVVVSPDVGGVARARAFAKKLSDAPLAIVDKRRSGHNVAEVMNLIGDVRGKVAIMVDDMIDTAGTIVKGAALLHQEGAREVYACCTHAVFSPPAIERLSGGLLQEVIVTNTLPVAEKNYFPQLTILSVANLLGETIWRVHDDSSVSSIFL

SEQ ID NO: 4426 - protein, 568 aa, Arabidopsis thaliana
MEAKIVKVSDSSYKDGLGKKRKHPGNYTPYDSGRSYAKLQWVLSPNSSTQKLEKRRNLDGENKVIVSENHVEKSLVRYFSYYKKTGVPKRVMFHENGEWIDLPDHILCDIRNDLEAKRATIEFNWCGRHFLLDFLHMYRLDLETGVKTQLAWIDIAGKCFFPETFDTLERDGCHHIRGEDPEQHDQREIKLHIEIDVNSGELPRLNLNVVTDESGDNMDDFQAVQRSSNGPNDEASEDSCSRELDDAVEKWDKTETDRFSGVKPAEEELDKDAVKQMFALGAATLGHVESLDVYQFSSEIAKARLSLFQKQADITKKHRGDANIRYAWVPAKKEVLSAVMMHGLGVGGAFIKKSMYGVGVHAANCPYFSARYCDIDDNGVRHMVLCRVIMGNMEPLRGDNTQYFTGGEEYDNGVDDVESPKHYLIWNMNMNTHIYPEFVVSFKLSIPNAEGNILPTTQSRHESSGLTLEGPKGSPSNEPGRVSNGGSGSEKNSSSSRRPRSPIMPFPLLFKAISSKIARKDMDLIIAGYQELREKKVSRKEFYKTLSMIVGDDDLLISTITGLQRSLG

SEQ ID NO: 4427 - protein, 331 aa, Arabidopsis thaliana
MFTCINCTKMADRGEEDEEDEARGSTTPNTKEAVKSLTTQIKDMASKFSGSHKQSKPTPGSSSSNLRKFPDFDTASESVPYPYPGGSTSSTPAWDLPRSSYHQSGRPDSRFTSMYGGERESISAQSCDVVLEDDEPKEWMAQVEPGVHITFVSLPSGGNDLKRIRFSREVFDKWQAQRWWGENYDRIVELYNVQRFNRQALQTPGRSEDQSQRDSTYTRIDSARESRDWTQRDNNFRPPGGSVPHHFYGPPMDAARITTSSRDEPPSMSNASEMQGEWVEEDEPGVYITIRQLPDGTRELRRVRFSRERFGEVHAKTWWEQNRDRIQTQYL

SEQ ID NO: 4428 - protein, 439 aa, Arabidopsis thaliana
MSVLLPMYPLQSLARSKRLFPIRTRSKPVCLALTNAQTNGGDQEEKVVIVGAGIGGLATAVSLHRLGIRSVVLEQAESLRTGGTSLTLFKNGWRVLDAISVGPQLRTQFLEIEGMVVKKEDGRELRSFKFKDDDQSQEVRAVERRVLLETLASQLPPQTIRFSSKLESIQSNANGDTLLQLGDGTRLLAQIVIGCDGIRSKVATWMGFSEPKYVGHCAYRGLGFYPNGQPFQKKVNYIYGKGIRAGYVPVSTTKVYWFICFNSPSLGPKITDPAILKKQAKELVSTWPEDLQNLIDLTPDETISRTPLVDRWLWPGIAPPASKGRVVLVGDAWHPMTPNLGQGACCALEDSVVLANKLANAINGGTESIEVAMESYGSERWSRAFPLTVRANLVGALLQWENPLVCSIRNNIVIPKLLRLGPMLEHTNFECEPLFVSKS

SEQ ID NO: 4429 - protein, 337 aa, Arabidopsis thaliana
MYIKELTETDEEKRERSVEDNVDDGDKAVLVSRGNVIVLTTKRALVGVGARALFYPTLVYNVVRNKLESEFRWWDRVAEFILLGAVPFPSDVPQLKELGVCGVITLNEPYETLVPSSLYKSYCIDHLVIATRDYCFAPSMEAICQAVEFIHRNASLGKTTYVHCKAGRGRSTTIVICYLVQHKNMTPEAAYSYVRSIRPRVLLAAAQWKAVVEYYHVKVLNTQSCLTDATSALIPRNVKQVCSGNVVVFDDGSMVVVTHSDLEGYNDDDSRSRRSVKVNGNELWAAAADLSMVYRVKVVGQAAMARISCLWLGLREDQKLSGKNLSMGGISVDISVY

SEQ ID NO: 4430 - protein, 61 aa, Arabidopsis thaliana
MPMDVDGALGLLRFGYLAIGSHIPLPCGAASLLLPFGTGHEIYIPLYFGFQFYLVRIVFSQ

SEQ ID NO: 4431 - protein, 823 aa, Arabidopsis thaliana
MVSKNDHIETLFNSIQLVKDVVLLPIELGVKKAARDIENCWISKERDLGLVFRSSGRNRKKRIVATPEFDDNATNNVQCVVVTDERKKGLSIKKIPVKSLFGMFSPNLVSEKLSRGNDVVVAKKDKSLEKKDDDSCTDCFKFAMTWSLLVSGFVHAFPIPFKIGKKRIHKMGDDENSLRKHGLKSKAAFVSRKEVRCQSVESVEKEGNPFSIECAVGFVVEMLAQNLQKLDQFIQDSSENESCCSKEASSNDSPLIFNIWEARKLDVNGFLGNLMFARVGDVASGIGGLTSHISEDGDESNVSTAGKEESAVDSPQNLATGLLSIPLSNVERLKSTLSTISLTELIELLPQLGRPSRDHPDKKKLISVQDFFRYTESEGRRFFEELDRDGDGKVTLEDLEIAMRRRKLPRRYAKEFMRRARSHLFSKSFGWKQFLSLMEQKEPTILRAYTSLCLTKSGTLKKSEILASLNNAGLPANEENAIAMMRFLKADTEESISYGHFRNFMVLLPYERLQDDPRNIWFEAATVVAVAPPVALPAGDVLKSALAGGLASALSTSLMHPIDTIKTRVQASTLSFPEVIAKLPEIGVRGVYRGSIPAILGQFSSHGLRTGIFEASKLVLINFAPNLPEIQVQSIASFCSTLLGTAVRIPCEVLKQRLQAGMFNNVGEAIVGTWKQDGPSGFFRGTGATLCREVPLYVVGMGLYAESKKMVAQALGRELEAWETIAVGAVSGGIAAVVTTPFDVMKTRMMTATPGRPISMSMVVVSILRNEGPLGLFKGAVPRFFWVAPLGAMNFAGYELAKKAMQKNEDAVLADQLGQKKLC

SEQ ID NO: 4432 - protein, 432 aa, Arabidopsis thaliana
MASEDLNIVAESKKGEENVIVDNSKDMNRPENLDLSTEKTDTANENGPKDEASKLVKEADLPESGTSVKSKTAKDNKPVKRKSGTFSRSPRFMSQSSSFPTKGAYTDITRKSIDATTSKTSLKPVVAGGSKPKATPSSSSGVSAKRTSLVSAPLKKQTMPVKTISKDAASGPTSKLGDEGSKSIKEETAGKDVEEAGSTTAVVADKVSNPLKAEMASKDDEDTRSTTTSTSTPRGRRSSVGSASGFSFRLEERAEKRKEFYMKLEEKIHAKEVEKTNLQAKSKESQEEEIKRLRKSLTFKAGPMPSFYKEPPPKVELKKIPTTRPKSPKLGRRKSSSDATGGEAAPRVTKPKDSSSSTVKKPITKSQPKLETQEKSVKAKEKKKKVKKEEAEKRGEEEKATAVAAKPEEQKPNSNNIQVKAEIMASEVVVGG

SEQ ID NO: 4433 - protein, 680 aa, Arabidopsis thaliana
MAAYFHGNPPEISAGSDGGLQTLILMNPTTYVQYTQQDNDSNNNNNSNNSNNNNTNTNTNNNNSSFVFLDSHAPQPNASQQFVGIPLSGHEAASITAADNISVLHGYPPRVQYSLYGSHQVDPTHQQAACETPRAQQGLSLTLSSQQQQQQQHHQQHQPIHVGFGSGHGEDIRVGSGSTGSGVTNGIANLVSSKYLKAAQELLDEVVNADSDDMNAKSQLFSSKKGSCGNDKPVGESSAGAGGEGSGGGAEAAGKRPVELGTAERQEIQMKKAKLSNMLHEVEQRYRQYHQQMQMVISSFEQAAGIGSAKSYTSLALKTISRQFRCLKEAIAGQIKAANKSLGEEDSVSGVGRFEGSRLKFVDHHLRQQRALQQLGMIQHPSNNAWRPQRGLPERAVSVLRAWLFEHFLHPYPKDSDKHMLAKQTGLTRSQVSNWFINARVRLWKPMVEEMYMEEMKEQAKNMGSMEKTPLDQSNEDSASKSTSNQEKSPMADTNYHMNPNHNGDLEGVTGMQGSPKRLRTSDETMMQPINADFSSNEKLTMKILEERQGIRSDGGYPFMGNFGQYQMDEMSRFDVVSDQELMAQRYSGNNNGVSLTLGLPHCDSLSSTHHQGFMQTHHGIPIGRRVKIGETEEYGPATINGGSSTTTAHSSAAAAAAYNGMNIQNQKRYVAQLLPDFVA

SEQ ID NO: 4434 - protein, 135 aa, Arabidopsis thaliana
MLGKRIASFKNLAKKMKSINTTTRSGGEGGSESTYNESLLMNEADEAAMMASKTPTGTFAVYVGEERVKRVVPTSYLNHPLFRMLLDKSHDEFLCFEQKVMLVVPCSLSVFQDVVNAVESCNGNFDFGEFVEEFL

SEQ ID NO: 4435 - protein, 940 aa, Arabidopsis thaliana
MALSSLVEFVILVVKNPCYQQDDASSSIQEISISASEIASWDMSEILSYGSVKVRAHRTRLIQESSYFHGLLSGSFSESGLDHISVEWNLESFLNLLMCLYGYDIEITSSSFLPLFESALYFGVEKLLSICKNWLSVLASSNDNALPKVELSDLIQIWSFGLEHAGEFVPDLCVAYLAKNFMLVKSDKYFGNVPYELLMWCVKHPHLTVHSEMDLVDGLLIWLDAGGRLSDLPESSQDNTINLMEQVRFSLLPLWFIAGRSKSHGFSKFADQSIELVTKLMKMPSTCLVDSLTDGPPTDVRVRLTEYSEILDLSGCPQLNEASLLLSILPNSYFANLRWRKSLESFLKNPDDDERHQEQISHRTLPILSFESVKEIDISKCQRLDYKVVIKCFSKSFPSLRKLRAAYLLNIKVSTLLELLLNFRELTEVDLTVDVSPIIPVQASVFYSGQGHCLLSSITRLTLEGRSDICDMELRSISRVCESLCYLNIKGCALLSDACIASVIQRCKKLCSLIVCYTSFSENSILALCATISMTNEHMDINSVASNLQTLHMSKCEGISETSLLNLITHSQKMKSLCLRDTKVSDSVLCEFPGSTLEALDISNTTISWMALARVISRNPNLKTLKARGCKNLLQLEVDGRTDNFSPLVSGQEVFKCLSKGSGLEELEIGWGFSYFSFESLRPAASFLRVISVGLGASLGEDVLKLLPSTCPLLESIVLHFQEISDSALTSVLTSLKHLQELALSYCFGEISLQSFKFSMPNLRKLRLERVTRWMTNDDLLVLTQSCPNLTELSLVGCLHLTSDCQPIISAGWPGMISLHLEECGSITENGVASLYGCIALEDLFLRHNGSGIQKSFLLDATLKFPMLRLVSLDMCDAKEGGFDVPEEKEEGRSLSIVKISRCKSDRCSLGRRAAPMHRETLVMLWNGQTLTKTLLKQRL

SEQ ID NO: 4436 - protein, 358 aa, Arabidopsis thaliana
MSSFTSKFADELIANAAYIGTPGKGILAADESTGTIGKRLASINVENVESNRRALRELLFTTPGALPCLSGVILFEETLYQKSSDGTPFVDMLKSAGVLPGIKVDKGTVELAGTNGETTTQGLDGLGDRCKKYYEAGARFAKWRAVLKIGVNEPSQLAIHENAYGLARYAVICQENGLVPIVEPEILVDGSHDIQKCAAVTERVLAACYKALSDHHVLLEGTLLKPNMVTPGSESAKVAPEVIAEHTVRALQRTVPAAVPAIVFLSGGQSEEEATRNLNAMNQLKTKKPWSLSFSFGRALQQSTLKTWGGKEENVKKAQEAFLVRCKANSEATLGAYKGDAKLGEGAAESLHVKDYKY

SEQ ID NO: 4437 - protein, 327 aa, Arabidopsis thaliana
MRGLAACYSEHAIKVSDTYCSGPSNHSYISPTLPPSIPDTVTTTYRSNLPSSDKPVSVSLTWSDNLTVVISTPPKSYSVSLRKPKGSRKLTSSSGSLNAEILWDLSEAEYENNGPEPIRRFFVVVVVNSEITLGVGDVDHERDTSSSSSWRVSKTERFSGTCWLTTKAQFSDVGRKHEIQIQCGGGGGGGGEEGYLWKVKSPETMSVYVDKRKVFSVKKLKWNFRGNQTMFFDGMLIDMMWDLHDWFYKETLSSVSTSSSSKTASSSSSSSTSSSTPPCAVFMFRRRSGLDSRLWIDEDEQESEMKKNIGSRDEKHSFSLIICASKK

SEQ ID NO: 4438 - protein, 1007 aa, Arabidopsis thaliana
MKEDLVPESNSSVWQSPVKRLAVDGECGEAGDRSRTSCKRIKTTQVNGFIVYTRTRKTKFTKLHEQEDENAGLSNHLEESKPTSGVTSGFGGDMCRSSSVGETNVSGSSCVKNTLVESSSGKVVVIERLVTGGLAESPAVETDSSSLVDVVIDDINFVELLHEAIPVEILSEGSLDFEVKRLGTKVRTMGKSYSVSEKKKHGSFKRTAQIYKSIVRMKKVNNLVPENVEVLAEPDFGREGLDEQSHSVSLADKSILIRSRPETVRDLFETGLLDGLSVVYMGTVKSQAFPLRGIIRDGGILCSCSSCDWANVISTSKFEIHACKQYRRASQYICFENGKSLLDVLNISRNTPLHALEATILDAVDYASKEKRFTCKRCKGPFPFSSLGHRGFLCKSCSEVETSQASLAATRTSTSAPACITSPVKSRLKITRKPSESTSISPVFMSSLGNSTRKITRKALRQALVGKAYLSASTNVSSQKKCRSKFKKMLTQHSVTPKALKSVSLSVSSKKRSYRLARKDQGLHKLVFDRGGLPEGTELGYYARGQKLLGGYKMGAGIYCYCCKCEVSPSLFEAHAGWASRRKPYFYIYTSNGVSLHEWATTFSHGRKYSANDNNDLCVICADGGNLLLCDSCPRAFHIECVSLPSIPRGNWHCKYCENKFTSEIAGEYNVNSSAVGQLEGVDPVDQLAGRCIRVVKNMEAETNGCVLCSGSDFCRSGFGPRTIIICDQCEKEYHIGCLSSQNIVDLKELPKGNWFCSMDCTRINSTLQKLLLGGAEKLSDSSLGIIQTKQERNDVYSISDLDIRWRLISGKVTSPESRMLLSQALAIFHDCFDPIVDPLSGSNLIPRMVYGKTMQGQDYGGICCAVLTVNATVVSAGLLRVFGREVAELPLVATRMCSREKGYFQLLFSCIEKLLSSLNVESIVVPAAEEAEPLWMNKFGFRKLAPEQLSKYIKICYQMVRFKGASMLQKPVDSHQIIDKTIETGASLEENFDLKQANELYVHPLC

SEQ ID NO: 4439 - protein, 410 aa, Arabidopsis thaliana
MGILSDDVVIISQSEKEGDPSVITINCPDKTGLGCDLCRILLFFGLNIVRGDVSTDGKWCYLVFWVIGKPNTRWNLLKMRLVEASPSFSWAFGISRCYLSDSESQPPKLPDLFLLKLACSDRTGLLYDVTEVLYKLEINIEKVKISTTPDGKVMDLFFVTDTRELLGTVKRRNEVYEYLRDAIGDSMISYDIELVGPEITACSTSSSVAETLFSSDVSGEHSSGLHTSSNVSIAVDNSLSSAHTLIHITCQDHKGLLYDIMRTFKDFNIQISYGRFTIKLGKNCEIDLFIVQSDGRKILDSSKLNALITRLRAELQQPLRVVMMNRGPDTELLVTNPVELSGKGRPQVFHDIALALKKIDTCIFSAEIGRHVTGDREWEVYKVLINEEDSLPIPRSKIEEEVWKTLMGWE

SEQ ID NO: 4440 - protein, 744 aa, Arabidopsis thaliana
MLKQFTHYCEMQAELIPEGPNGEGRLSNQNSNPNLLSSASISITQFPAKKPTRQWAAWTHQEEESFFTALRQVGKNFEKITSRVQSKNKDQVRHYYYRLVRRMNKLLGPDLSLDAKNPKDTNAAMLRWWSLLEKYSCKASKLHLKPRRFKLFIEALEHQLLKDRRKSIRKRTCQGENLSSASLGNISSHSRERGLDNRPFKLILSDGQNVKKLGPGRASTKHGESLSVNLGDEKEDTAFGRGGRQRRKQAGYRKWEKAAIDGVSLVADAAEHLERTSIDKDMDDQTDLGPTRYLTGKSPLSLCSAGDVPLSDANMQFSAKLKLQLFPIDECTRRSLEMDKHNPHLELTLSNRKKISSVLEHLNRKWGSSSCATGELLLFPYNARKETVTCHQRWTHDSFLSAAEVHSMVGSPSVFRLRYGWFVHDASGSIISQVPTSDPCPSLEDDMNVDRLNEVNMLLTESGPLSVHSTAEQTTSVEPSQGLVCASGVHDRPARSRDDYEPASTSITPLEHLSGGNAQSPGEWADSLTNISIGDLLSEVPDDIDSDGVDPPATEGSHYLLRDVPFTSDSFDAAIAAHILRHQNKPSAQLPLTSGSSSLWDDEETRDAFSFQKNRFANSTELASVASPKGVGRVNGEPSQLVEASSGDEGSYNPHDDGDPMEEGPADPHTMDSPGKTPCGLADVYWPDSLGPLDLDIRSSKYTDDLILSESLGGLSRLIATSLDAFQNCSLFGFDNKKDKSNMV

SEQ ID NO: 4441 - protein, 583 aa, Arabidopsis thaliana
MQTPKPRPGSLEVPQKKSPASTPKTARKLKTSESDPVSSPNTKIRTPKTQSPKVVADRRSPRTPVNEIQKKRTGKTPELASQISQLQEELKKAKEQLSASEALKKEAQDQAEETKQQLMEINASEDSRIDELRKLSQERDKAWQSELEAMQRQHAMDSAALSSTMNEVQKLKAQLSESENVENLRMELNETLSLVEKLRGELFDAKEGEAQAHEIVSGTEKQLEIANLTLEMLRSDGMKMSEACNSLTTELEQSKSEVRSLEQLVRQLEEEDEARGNANGDSSSVEELKEEINVARQEISQLKSAVEVTERRYHEEYIQSTLQIRTAYEQVDEVKSGYAQREAELGEELKKTKAERDSLHERLMDKEAKLRILVDENEILNSKIKEKEEVYLNLENSLNQNEPEDTGELKKLESDVMELRANLMDKEMELQSVMSQYESLRSEMETMQSEKNKAIDEALAKLGSLTEEADKSGKRAENATEQLGAAQVTNTELEAELRRLKVQCDQWRKAAEAAATMLSGGNNNNNSNGKYVERTGSLESPLRRRNVNMSPYMGETDDELSSPKKKNGSMLKKIGVLLKKSQK

SEQ ID NO: 4442 - protein, 599 aa, Arabidopsis thaliana
MLVPHVSPLGLVAGLSLMYSDLRIVLWTFLVDWESKANLNSSHLEVILIHRGLMGHRHFLGSSQFFDDEHDQGWNHTHPEHPYSSQATSGTSENRSHVYPAENMLNEGMPVSSHWNSSPGPNAYTDSGHSVERPHYNPGVSGPSHDPSVNSTVPTFSAPHENYVTFASSSSYNSQTWSNASYVDHQSMESVRGAQKRKRPCPSSIYEMGSSSQYHGDRTPADTHFPSELHLGKSITHDHDPHYMPWLMNPTYRSNNLSIRGESSSRNVRSRPTLDSETSLGRNNLPRSLSLDSHSTHHHSVDHYGSGQFPGQTSHGNKDWNCARLSPVLRDINGFSPETNNFLPARSVVNSLSVNTSGYHHHELTGNRNPTVSHGVPGTSTLSTSSSRFSHRSTSTYRSSSHGSRSGHVASSSGDRSHLVTETYPSRHLRPPPHISWRSGDRPGRRRSSYERFQPPFDEVALHERFSSEEFMVEDRQPQYYGSRNMLDHHRDMRLDIDNMSYEELLDLGERIGSVNTGLSDSAISSCLLATMYYPSYQTEEQRKCAICLEEYKEKEELGEVKGCGHDYHGRCIKKWLSMKNSCPICKSPALPDASKNSS

SEQ ID NO: 4443 - protein, 573 aa, Arabidopsis thaliana
MMNTSNGMISGPSSSSASAANPQSPGIKTYFKTPEGKYKLHYEKTHPSGLLHYTHGKTVTQVLCKNIKCTFHFYVLKVVSENGFVKFWCQVTLAHLKDKPAPSTPTGTSSSSTASSGFRSATARLLGGGNGNRALSFVGGNGGAKNVGASSRIGASFAASSSNTSATNTNFDGKGTYLVFNVGDAIFISDLNSQDKDPVKSIHISNSNPMCHAFHPDAKDGHDLLIGLNSGDVYTVSLRQQLQDVGKKLVSAQHYNKDGSVNNSRCTSIAWVPGGDGSFVAAHADGNLYVYEKNKEGATDSSFSAIRDPTQFSVDKAKYSKSNPVARWHIGQGAINSIAFSNDGAYLATVGRDGYLRIFDFSTQKLVCGVKSYYGALLCCAWSMDGKYLLTGGEDDLVQVWSMEDRKVVAWGEGHNSWVSGVAFDSYWSSPNSEGSGENVMYRFGSVGQDTQLLLWDLEMDEIVVPLRRPPGGSPTYSTGSQSAHWDNIVPMGTLQPAPCMRDVPKLSPVVAHRVHTEPLSGLIFTQESLITACREGHLKIWTRPDTQPSSSSEATNPTTSKPSLTSKVGGSS

SEQ ID NO: 4444 - protein, 290 aa, Arabidopsis thaliana
MPRYDDRYGNTRLYVGRLSSRTRTRDLERLFSRYGRVRDVDMKRDYAFVEFGDPRDADDARHYLDGRDFDGSRITVEFSRGAPRGSRDFDSRGPPPGAGRCFNCGVDGHWARDCTAGDWKNKCYRCGERGHIERNCKNSPKKLRRSGSYSRSPVRSRSPRRRRSPSRSLSRSRSYSRSRSPVRRRERSVEERSRSPKRMDDSLSPRARDRSPVLDDEGSPKIIDGSPPPSPKLQKEVGSDRDGGSPQDNGRNSVVSPVVGAGGDSSKEDRSPVDDDYEPNRTSPRGSESP

SEQ ID NO: 4445 - protein, 194 aa, Arabidopsis thaliana
MSSVCGKLDFKDADFDISTSSPTQCSKGSEHTSFTGSEDSQESDGDETGYIDPTVNDETAVQDFGKSVLSPNSSDDEDKDENLMTQTPIVLIPAIKGSREKYGLSLRKSSVSWGADVYDPPPSIASHTVTRSKKQQQKSKSKDNHRKTGKKGQKSKDNSSSRGGSSKDKKQASRKHSRDKFDWVTQMPIVAASS

SEQ ID NO: 4446 - protein, 494 aa, Arabidopsis thaliana
MENHHPSTLLSMDSSASSHEELDLEMNNNRQSLLSGPPDINLPLSAERSPPPPPWNLDACDILDVGLGSQAYETENYMSVVPKVGRKCAKRVDSIWGAWFFFSFYFKPALNEKSKAKIVRDSNGISGFDKSDLKLDVFLVQHDMENMYMWVFKERPENALGKMQLRSYMNGHSRQGDRLFPFSVEKGFVRSHRMQRKHYRGLSNPQCVHGIELVPLPNLTCLDEEERKRWMELTGRDLNFTIPPEASDFGSWRNLPNTDFELERPTPSLKNPTANHSKKLLNGSGLNLSTQPSNHSNGEATDLSPSSHKKRKDLFSNGIHEEECCLTVNPQPPVIEAHQNELPTWSNEFTGAMKNVYGPVTAAKTIYEDEEGYLIIISLPFVDLNSVKVSWRNTLTHGIIKVSCLSTSRVPFIKRHDRTFKLTDSASEHCPPGEFVREIPLSNRIPEDANIEAYYDGPGSVLEILVPKLRAGPEEHEVRVCLRPNLGGNDLMLT

SEQ ID NO: 4447 - protein, 733 aa, Arabidopsis thaliana
MAQFTGRVVGDYLVGRQIGSGSFSVVWEARHRVDGTEVAIKEIAMDRLNKKLQESLMSEIFILRRINHPNIIRLIDMIKSPGKVHLVLEYCKGGDLSVYVQRHGIVPEATAKHFMQQLAAGLQVLRDNNIIHRDLKPQNLLLSTNENDADLKIADFGFARSLQPRGLAETLCGSPLYMAPEIMQLQKYDAKADLWSVGAILFQLVTGRTPFTGNSQIQLLQNIIRSTELHFPGDCRDLSLDCIDLCQKLLRRNPVERLTFEEFFNHPFLSDRQSYDFSRSRLGLRTMDGFLSSGSSPSRNMEESSQEDCLPFLLDDDSSGPEGSPSYLKKTSSMKSSSGIKVDTRIERKEVESSPLKHTELTSGYSSFNQKVENDRFRFETQINSDRRNRREPTGLTDSRSLIAPGRVDDSQDSMDQDFVLVSGPPVDMPSSSSSSSKPYNFPFKSQSPPVELFNRSISSTAPMPIIGATSNSIGQFGSLDSQYSAPSTSHGSLDLGDAFEQPSTHSLTRIRSLRKYAATIAELVYERIESDKHLEAFSIQLAILAIWKQALHICHTQAISGLEGSPSQDINKLRSSSLKHDTHSSNKVTDLSHDGSEEISSQIQRQFIQEIELAEELAKSIEPGNTKMPDAMETIFEAALDLGKLGGVKEVMGDTENAGNQYSKAVRLLVFLLVEAPMLILNPPLSLTNSVRYRLRTYIDFLSRRLKHLQSHRRSSAGQMQGSSLAMMNRQS

SEQ ID NO: 4448 - protein, 337 aa, Arabidopsis thaliana
MNVDARVGVAVDGAQSALNTATTVHSSVVMTQIKPQAKLGTFQNLLAGGIAGAISKTCTAPLARLTILFQLQGMQSEGAVLSRPNLRREASRIINEEGYRAFWKGNLVTVVHRIPYTAVNFYAYEKYNLFFNSNPVVQSFIGNTSGNPIVHFVSGGLAGITAATATYPLDLVRTRLAAQRNAIYYQGIEHTFRTICREEGILGLYKGLGATLLGVGPSLAINFAAYESMKLFWHSHRPNDSDLVVSLVSGGLAGAVSSTATYPLDLVRRRMQVEGAGGRARVYNTGLFGTFKHIFKSEGFKGIYRGILPEYYKVVPGVGIVFMTYDALRRLLTSLPD

SEQ ID NO: 4449 - protein, 769 aa, Arabidopsis thaliana
MASISHSSLALGGASSASASDYLRSSSNGVNGVPLKTLGRAVFTTIRRKDLAVTSRLKKGKKFEHPWPANPDPNVKGGVLSYLAEFKPLGDTQKPVTLDFEKPLVELEKKIVDVRKMANETGLDFTEQIITLENKYRQALKDLYTHLTPIQRVNIARHPNRPTFLDHIHNITDKFMELHGDRAGYDDPAIVTGIGTIDGKRYMFIGHQKGRNTKENIMRNFGMPTPHGYRKALRMMYYADHHGFPIVTFIDTPGAYADLKSEELGQGEAIANNLRTMFGLKVPILSIVIGEGGSGGALAIGCANKMLMLENAVFYVASPEACAAILWKTSKAAPEAAEKLRITSKELVKLNVADGIIPEPLGGAHADPSWTSQQIKIAINENMNEFGKMSGEELLKHRMAKYRKIGVFIEGEPIEPSRKINMKKREAVFSDSRKLQGEVDKLKEQILKAKETSTEAEPSSEVLNEMIEKLKSEIDDEYTEAAIAVGLEERLTAMREEFSKASSEEHLMHPVLIEKIEKLKEEFNTRLTDAPNYESLKSKLNMLRDFSRAKAASEATSLKKEINKRFQEAVDRPEIREKVEAIKAEVASSGASSFDELPDALKEKVLKTKGEVEAEMAGVLKSMGLELDAVKQNQKDTAEQIYAANENLQEKLEKLNQEITSKIEEVVRTPEIKSMVELLKVETAKASKTPGVTEAYQKIEALEQQIKQKIAEALNTSGLQEKQDELEKELAAARELAAEESDGSVKEDDDDDEDSSESGKSEMVNPSFA

SEQ ID NO: 4450 - protein, 475 aa, Arabidopsis thaliana
MAGAYDPSLPEVPEWLNKGDNAWQLTAATLVGLQSMPGLVILYASIVKKKWAVNSAFMALYAFAAVLLCWVLLCYKMAFGEELLPFWGKGGPAFDQGYLKGQAKIPNSNVAAPYFPMATLVYFQFTFAAITTILVAGSVLGRMNIKAWMAFVPLWLIFSYTVGAYSIWGGGFLYQWGVIDYSGGYVIHLSSGVAGFVAAYWVGPRPKADRERFPPNNVLLMLAGAGLLWMGWSGFNGGAPYAANLTSSIAVLNTNLSAATSLLVWTTLDVIFFGKPSVIGAIQGMVTGLAGVTPGAGLIQTWAAIIIGVVSGTAPWASMMIIHKKSALLQKVDDTLAVFYTHAVAGLLGGIMTGLFAHPDLCVLVLPLPATRGAFYGGNGGKQLLKQLAGAAFIAVWNVVSTTIILLAIRVFIPLRMAEEELGIGDDAAHGEEAYALWGDGEKFDATRHVQQFERDQEAAHPSYVHGARGVTIVL

SEQ ID NO: 4451 - protein, 310 aa, Arabidopsis thaliana
MPLHMKIQPIDESDVSEEVPYPETMRQMPKSRLKRLFERQFTNKNVSEKFTGSDVEAPLSRGNSGDFEPSSVCLAKMVLNFMEDNNGGEKQRCGRSRCNCFSGSGTESSDDETECSSGEACEILKSLVLCKSIRVRNLLTDVTKIAETSKNCKLKDGSCLKSVANGLVSLGYDAALCKSRWEKSPSCPAGEYEYVDVIMKGERLLIDIDFKSKFEIARATKTYKSMLQTLPYIFVGKADRLQKIIVLICKAAKQSLKKKGLHVPPWRRAEYVKSKWLSSHVRVDQNSNGEVKQESVEVIAESVSSIVFGV

SEQ ID NO: 4452 - protein, 772 aa, Arabidopsis thaliana
MIADAVSKSDHKRYRLSSFSIATLLISLLLREVNEVGFMNRDAYGFSVRPQHVQRYREYVNIYKEEEVERSARWSNFLEFHAESGVSPTNGSSENTHVNPSESDKKKEKELNKGAERKDLNADKPGSDLTPGNAREEDEVPNREKNVHKVQLWAEIRPSLQAIEDLMSVRVKMKGDSTNGEQEAQKLNSLASTDETESSKGVCENDSEDEFYDAERSDPIQDGSSDGTSVSSMSAAADAASLVSACPWKDELEVLIHGGAPMALRGELWQAFAGVKKRRVKNYYQNLLAADSLGNDIEQELMQHTDEKGSSTDPLSVVEKWKGQIEKDLPRTFPGHPALDDDFRNALRRLLTAYARHNPSVGYCQAMNFFAALLLLLMPEENAFWSLTGIIDDYFHDYYSEEMLESQVDQRVLEELLRERFPKLVHHLDYLGVQVACVTGPWFLTIFINMLPWESVLRVWDVLLFEGNRVMLFRTALALMEFYGPALVTTKDIGDAVTLLQSMTGSTFDSSQLVFTACMGYQNVHESKLQELRSKHRPAVIAAFEERLKGLQAWRDSKDTATKLHNSKQDPNSVLASKASLSNGSLSRSESGSSYADDIFISLTGDCEIDIFQDLQGQGELHKLLQEKRSALLRAEELEVALMEMVKQDNRRQLKAKIEQLEQGVTELRRLVSDKREQESAMIQVLMRMEQEHKVTEDARRLAEQDAATQRYAAEVLQEKYEEAVAALAEMEERAVMAESMLEATLQYQSGQVKAQPSPRQLKQDLPVMVSP

SEQ ID NO: 4453 - protein, 331 aa, Arabidopsis thaliana
MSDALINGLAGAGGGIIAQLLTYPLQTVNTRQQTERDLKREKRKLGTIEHMCQVVKQEGWERLYGGLAPSLAGTAASQGVYYYFYQVFRNRAEATALARKKKGLGDGSVGMFASLLVAAFAGSVNVLMTNPIWVIVTRMQTHRKMTKDQTAAPESPSSNAEALVAVEPRPYGTFNTIREVYDEAGITGFWKGVIPTLIMVSNPSMQFMLYETMLTKLKKKRALKGSNNVTALETFLLGAVAKLGATVTTYPLLVVKSRLQAKQVTTGDKRQQYKGTLDAILKMIRYEGLYGFYKGMSTKIVQSVLAAAVLFMIKEELVKGAKLLLSNATSS

SEQ ID NO: 4454 - protein, 570 aa, Arabidopsis thaliana
MAVDVKSVLEFLRRNGLTEAESALRDDINEKNKLASFDFEKFLFPIPTPIKITASSRPSDSGGDGSNSKSSSSDDEFVSLDSSTSGFCSSSGFVNPYGDSSSSSDGQSQFGTARTYPEWSEFYLHNETEDEDEFMSPAFRESDCFILPENAEDKFITDNQFENSLGVYDRSSSQGSLTEASLDYLDKPFLLDIGLEDKTDELDLKTGDQLNVTDEEVDVVHEVEDEYEVFNLRIIHWKNRTGFEENKDLPIVINTVIGGRYYITEYIGSAAFSKVVQAQDLHNGVDVCLKIIKNDKDFFDQSLDEIKLLKHVNKHDPADEHHILRLYDYFYHQEHLFIVCELLRANLYEFQKFNQESGGEPYFNLSRLQVITRQCLDALVFLHGLGIIHCDLKPENILIKSYKRCAVKIIDLGSSCFRSDNLCLYVQSRSYRAPEVILGLPYDEKIDLWSLGCILAELCSGEVLFPNEAVAMILARIVAVLGPIETEMLEKGQETHKYFTKEYDLYHLNEESNEIEYIITEESSLEEQLQVSDELFLDFVRTLLDINPLRRPTALEALNHPWLSSSSSYN

SEQ ID NO: 4455 - protein, 583 aa, Arabidopsis thaliana
MEAAKVYTQDGTVDLQGRPVLASKTGRWRACSFLLGYEAFERMAFYGIASNLVNYLTKRLHEDTISSVRNVNNWSGAVWITPIAGAYIADSYIGRFWTFTASSLIYVLGMILLTMAVTVKSLRPTCENGVCNKASSLQVTFFYISLYTIAIGAGGTKPNISTFGADQFDSYSIEEKKQKVSFFNWWMFSSFLGALFATLGLVYIQENLGWGLGYGIPTVGLLVSLVVFYIGTPFYRHKVIKTDNLAKDLVQVPIAAFKNRKLQCPDDHLELYELDSHYYKSNGKHQVHHTPVFRFLDKAAIKTSSRVPCTVTKVEVAKRVLGLIFIWLVTLIPSTLWAQVNTLFVKQGTTLDRKIGSNFQIPAASLGSFVTLSMLLSVPMYDQSFVPFMRKKTGNPRGITLLQRLGVGFAIQIVAIAIASAVEVKRMRVIKEFHITSPTQVVPMSIFWLLPQYSLLGIGDVFNAIGLLEFFYDQSPEEMQSLGTTFFTSGIGLGNFLNSFLVTMIDKITSKGGGKSWIGNNLNDSRLDYYYGFLVVISIVNMGLFVWAASKYVYKSDDDTKEFSGGGCVQMEAKALDTSPLSI

SEQ ID NO: 4456 - protein, 324 aa, Arabidopsis thaliana
MADKLTDDQITEYRESFRLFDKNGDGSITKKELGTMMRSIGEKPTKADLQDLMNEADLDGDGTIDFPEFLCVMAKNQGHDQAPRHTKKTMADKLTDDQITEYRESFRLFDKNGDGSITKKELRTVMFSLGKNRTKADLQDMMNEVDLDGDGTIDFPEFLYLMAKNQGHDQAPRHTKKTMVDYQLTDDQILEFREAFRVFDKNGDGYITVNELRTTMRSLGETQTKAELQDMINEADADGDGTISFSEFVCVMTGKMIDTQSKKETYRVVNQGQGQVQRHTRNDRAGGTNWERDIAVGVASNIIASPISDFMKDRFKDLFEALLS

SEQ ID NO: 4457 - protein, 163 aa, Arabidopsis thaliana
MAMVSGRRSTLNPDAPLFIPAAVRQVEDFSPEWWQLVTTSTWYPDYWISQQQQGADGFYDNGENENGGGHIDVADLLPESFDFDDMEDFFDTDAAEFDQGFDGRMYYQAPSEFGFGKNGEMVKKSSGNRSPRSIVEPAKYAEKPAKWGNQRVAAAPRNIHQPR

SEQ ID NO: 4458 - protein, 289 aa, Arabidopsis thaliana
MGREGDQMKRKRRDLTNKTRGPCNFCEFSSSRYGCSSEDKLQEQDNEAVLRKEVERLRLLIKRMTGKEDIVSFTELLALQSHLMDVRSIVLEQKKEVELEEAERPHKQKKEAEHDADGMRRGVLVPCKFSASSLGERQEDPNGEAPLLQMQREFEQRSSESLQSEFDKLWLFNERMNGRELEGMTSFDLSILHIQILRALRALIDQKLGPRQEHRAWQRGELVCHTDKESVSGLAEPGRCSSDNDKDADSSLQCRLLLVSRKLRRFHNSYQRKSMPETRSVCQSRVTSD

SEQ ID NO: 4459 - protein, 458 aa, Arabidopsis thaliana
MASVSSSDQGPKTEAGCSGGGGGESSETVAASDQMLLYRGFKKAKKERGCTAKERISKMPPCTAGKRSSIYRGVTRFGCELGVVLSVLEYGMFGLVDMHFVSRLKLEEMSRHRWTGRYEAHLWDKSTWNQNQNKKGKQVYLGAYDDEEAAARAYDLAALKYWGPGTLINFPVTDYTRDLEEMQNLSREEYLASLRRKSSGFSRGIAKYRGLQSRWDASASRMPGPEYFSNIHYGAGDDRGTEGDFLGSFCLERKIDLTGYIKWWGANKNRQPESSSKASEDANVEDAGTELKTLEHTSHATEPYKAPNLGVLCGTQRKEKEISSPSSSSALSILSQSPAFKSLEEKVLKIQESCNNENDENANRNIINMEKNNGKAIEKPVVSHGVALGGAAALSLQKSMYPLTSLLTAPLLTNYNTLDPLADPILWTPFLPSGSSLTSEVTKTETSCSTYSYLPQEK

SEQ ID NO: 4460 - protein, 1025 aa, Arabidopsis thaliana
MSAVSGVISRQVLPVCGSLCILCPALRARSRQPVKRYKKLIAEIFPRNQEEGINDRKIGKLCEYAAKNAVRMPKISDSLEHRCYKELRNENFHSAKIAMCIYRRLLVTCKEQIPLFSSGFLRTVQALLDQTRQDEMQIVGCQSLFEFVINQKDGSSLFNLEGFLPKLCQLGLEGGDDDRSRSLRAAGLQALSAMIWLMGEYSHIPSEFDNVVSAVLENYGHPKILTNANDSGRKWVDEVLKNEGHVAYEDSLINVPSWRTVVNDKGELNVKMEDSLDPSFWSKVCLHNMAKLGEEATTMRRILESLFRNFDEGCLWSTENSIAFPVLRDLQFLMEISGQRTHFLLSMLIKHLDHKSVLKHPSMQLNILEVTSSLSETAKVEHSATIVSAISDIMRHLRKCMHSSLDEANLGTDAANCIRMVSVAVDKCLVQLTKKVGDAGPILDAMALMLENISAVTDVARTTIAAVFRTAQIIASIPNLQYQNKAFPEALFHQLLQAMVHPDHKTRIGAHRIFSVVLVPTSVCPRPSSTTTDLKKGMGLPRSLSRTASVFSSSAALFEKLKKDKFSSMLTSDHSQNGMPEEERGSSTGEILDRLKSSYRQAYSTWNQPLTSVVDNSVDLLNSELDVVHIRLSSHQIGLLLSSIWAQSISPANTPDNYEAIANTYSLVLLFSRVKNSSHDALIRSFQMALSLRDISLMEGGPLPPSRRRSLFTLAASMVLFSSKAFNLFSLADFTKVTLQGPRLDPFLNLVDDHKLKAVNSDQLKVAYGCEKDDASALDTLSNIALSTEHSRGTLVYEIVKSLEDMCNSEMDKMREQLLTEFMPDDACPLGTRFLEDTHKTYQIDSGDVKPRKEDAEDQEFGDGTETVTKNNHVTFSEIPDLLTVNQILESVVETTRQVGRISFHTAADASYKEMTLHCENLLMGKQQKISSLLNSQLRHESSVNCSPRQHDEEIKIASFHPMINSAFHTGVEVPLLSKEFDMKSPRTPVGTIQSPCYAELQNNPQAFRLPASSPYDNFLKAAGC

SEQ ID NO: 4461 - protein, 425 aa, Arabidopsis thaliana
MGEEISSTVNLDLNLGPDPELGLEPATNYARSDWGNGLAARESESLRRFRSRYRSRFRRIDMLPVLAETHSPAMELSQLLITSGNVVALPAGEGSMASGERVIEDSKKCENGSKVMAEDNVTEEKRDVEKSVGSDGSFFDCYICLDLSKDPVVTNCGHLYCWSCLYQWLQVSEAKECPVCKGEVSVKTVTPIYGRGIQKRESEEVSNTKIPSRPQARRTESLRTTLNRSGHIPTEIFRHLQDRLERESSTGERRARPSLNRFMTSRGVRAEENQSSEALVEPSSDEINDIDLILNNAPENEEENENLSSSRALATQRRWAQMYGRVSSFTLSSAERLADTYLITHALGRNQEQNSSPPVGVEDRDSFSSIVGVINSESQVETAAEINSMLTVSTSSSVRRHENSSRVSDVDSADSRPLRRRRRLA

SEQ ID NO: 4462 - protein, 327 aa, Arabidopsis thaliana
MDLTQGFRARSGVVGPVAGLESLNFSDEFRHLVTTMPPETTGGSFTALLEMPVTQAMELLHFPDSSSSQARTVTSGDISPTTLHPFGALTFPSNSLLLDRAARFSVIATEQNGNFSGETANSLPSNPGANLDRVKAEPAETDSMVENQNQSYSSGKRKEREKKVKSSTKKNKSSVESDKLPYVHVRARRGQATDNHSLAERARREKINARMKLLQELVPGCDKIQGTALVLDEIINHVQTLQRQVEMLSMRLAAVNPRIDFNLDSILASENGSLMDGSFNAESYHQLQQWPFDGYHQPEWGREEDHHQANFSMGSATLHPNQVKMEL

SEQ ID NO: 4463 - protein, 669 aa, Arabidopsis thaliana
MKARTTNNVVQSKRSTKSVRKDQKLQKTNSQKKTEQEKHKDLDTKEESSNISTVASDSTIQSDPSESYETVDVRYLDDDNGVIASADAHQESDSSSVVDKTEKEHNLSGSICDLEKDVDEQECKDANIDKDAREGISADVWEDASNGALSAGSENEAADVTENNGGNFEDGSSEEKIERLETRIEKLEEELREVAALEISLYSVVPDHCSSAHKLHTPARRISRIYIHACKHFTQGKRATIARNSVSGLVLVAKSCGNDVSRLTFWLSNIIALRQIISQAFGRSRITQISEPNESGNSDSGKKTNLRWKNGFQQLLEDWQETETFTTALEKIEFWVFSRIVESVWWQVFTPHMQSPEDDSSASKSNGKLMGPSLGDQNQGTFSISLWKNAFRDALQRICPMRGAGHECGCLPVLARMVMDKCIGRFDVAMFNAILRESEHQIPTDPVSDPILDSKVLPIPAGDLSFGSGAQLKNAIGNWSRCLTEMFGMNSDDSSAKEKRNSEDDHVESKAFVLLNELSDLLMLPKDMLMEISIREEICPSISLPLIKRILCNFTPDEFCPDQVPGAVLEELNAAESIGDRKLSEASFPYAASSVSYMPPSTMDIAEKVAEASAKLSRNVSMIQRKGYTSDEELEELDSPLTSIVDKASDFTGSATSNARYKLLRQVWV

SEQ ID NO: 4464 - protein, 321 aa, Arabidopsis thaliana
MAQLPPKIPNMTQHWPDFSSQKLSPFSTPTATAVATATTTVQNPSWVDEFLDFSASRRGNHRRSISDSIAFLEAPTVSIEDHQFDRFDDEQFMSMFTDDDNLHSNPSHINNKNNNVGPTGSSSNTSTPSNSFNDDNKELPPSDHNMNNNINNNYNDEVQSQCKMEPEDGTASNNNSGDSSGNRILDPKRVKRILANRQSAQRSRVRKLQYISELERSVTSLQAEVSVLSPRVAFLDHQRLLLNVDNSALKQRIAALSQDKLFKDAHQEALKREIERLRQVYNQQSLTNVENANHLSATGAGATPAVDIKSSVETEQLLNVS

SEQ ID NO: 4465 - protein, 606 aa, Arabidopsis thaliana
MQQDNRKKNNLEMEFFSDYGDANRFKVQEVIGKGSYGVVCSAIDTLTGEKVAIKKIHDIFEHISDAARILREIKLLRLLRHPDIVEIKHIMLPPSRREFKDIYVVFELMESDLHQVIKANDDLTREHYQFFLYQLLRALKYIHTANVYHRDLKPKNILANANCKLKICDFGLARVAFNDTPTTIFWTDYVATRWYRAPELCGSFYSKYTPAIDIWSIGCIFAEVLMGKPLFPGKNVVHQLDLMTDLLGTPSLDTISRVRNEKARRYLTSMRKKPPIPFAQKFPNADPLSLKLLERLLAFDPKDRPTAEEALADPYFKGLAKVEREPSCQPITKMEFEFERRKVTKEDIRELISREILEYHPQLLKDHMNGADKASFLYPSAVDQFRRQFAHLEENSGKTGPVAPLERKHASLPRSTVIHSTAVARGGQPKLMNNTNTLNPETTQNIPFNHATIQAQQRNLSAAKPSTFMGPVAPFDNGRISRDAYDPRSFIRSTNLPFSQQSAATVAMGKQQERRTTMEPEKQARQISQYNRYAPDVAINIDNNPFIMARTGMNKAENISDRIIIDTNLLQATAGIGVAAAAAAAAPGGSAHRKVGAVRYGMSKMY

SEQ ID NO: 4466 - protein, 351 aa, Arabidopsis thaliana
MRAPSLLAQCLPGLLPQDRGGVSALSEKDLQLPTPAVEIIPSKTVAHHRYSGENLDALGLQVFKGKVSVADIIGLSGSETAPLKNEGSLKSWESSVVLVNVLKNEIRDGQLSFRGKRVLELGCNFGVPGIFACLKGASSVHFQDLSAETIRCTTIPNVLANLEQARDRQSRQPESPLTPSRQAISASVRFYAGEWEELSTVLSIIRTDVLEPSIPAMNLSFSEEDFMDGCSSQDGSITGQPDFSSRRSRKLSGSRAWERANETGQEGEYGYDVILMTEIPYSITSLKKLYSLIKKCLRPPYGVMYLAAKKQYVGFNSGAKHLRNLVDEETILGAHLVKETTDRDIWKFFLK

SEQ ID NO: 4467 - protein, 331 aa, Arabidopsis thaliana
MPVISKASSTTTNSSIPSCSRIGGQLCVWPGLRQLCLRKSLLYGVMWLLSMPLKTLRGARKTLKITHFCSISNMPSSLKIELVPCSKDNYAYLLHDEDTGTVGVVDPSEAAPVIEALSRKNWNLTYILNTHHHDDHIGGNAELKERYGAKVIGSAVDKDRIPGIDILLKDSDKWMFAGHEVRILDTPGHTQGHISFYFPGSATIFTGDLIYSLSCGTLSEGTPEQMLSSLQKIVSLPDDTNIYCGRENTAGNLKFALSVEPKNETLQSYATRVAHLRSQGLPSIPTTVKVEKACNPFLRISSKDIRKSLSIPDSATEAEALRRIQRARDRF

SEQ ID NO: 4468 - protein, 136 aa, Arabidopsis thaliana
MESINESYDDSSSFGQDSLLYNRPFAYLYLSFHLKLLYSVPASYIAMIRAGSVGKKSTCEYTYWDDGVGEEVMGDDSWDYEGRKISHIYVAFDEVIMSIQFGFLENGALVLSKQHGGIEEGSNFRVLRLNQDEYVT

SEQ ID NO: 4469 - protein, 582 aa, Arabidopsis thaliana
MENDDMYPDEPVGSDLEPQESDVVFARESPLVGIITQPTKCSGSTAKILKCRGLEQQKKLNRQDRIELGRLFQGAVSSQDWQLSERFIQLADPQTLNDLLCISLDSIWFLSTEHELRGITELIAKIICHGAQDYTRATLRTSFLASCVSSCHSRTVSLADTVTVMAQRLHERLQECNGDEVLKAEAGAKVQKFTEWALKCIGFHSRCQGPRDKANQDSAAEIQLQLSAFKMFLDLAGNHLSGKDFTEAFDAACFPLTLFSTSFNPGWASGISATVIHGLLGMLVEGGADNVNQCFLEASRFGSTELVRILLQIAQRNSLDVDVDLALGFASHYSKIETMDCLVEEGHAIAFLGPLMRAAERGCMQVVQWFVKRGCREMELCLALTAATSSSQVEVAAYLLPHVPRPVLTALSIEILKAAGERSGGSLHGVEFLLKSDFLGDPAATYSVADTIAKSEDESVPSDLKSFLQEQWSEAAFNQGLKESRENYMNFMRVLKLGESAISLKDLPAPLRVAIAYMPLYRECVDAGGRLLSQKLRGQLVEAATQLEGFDVDTEEVKKGHHQLMTILEHHLPLFLVKASLH

SEQ ID NO: 4470 - protein, 413 aa, Arabidopsis thaliana
MSTSVQGETMDLDLNQEPSSDSESPGGLMTALSPMLEELESAQERIQERIRQLEVIVSRIREREITTTTTPALVSPNEHRDSTAGVIHERSRERLVENGENKTYLIAKALNMEKTSSVPGGFFDCNICLEKAEDPILTCCGHLFCWGCFYQLPLIYLNIKECPVCDGEVTDAEVIPIYGNGDDCDGTKPKLEDCGISLPPRPNAKRVESVRQKIINRGNPFFPGHENEAIEHIRRTIDSIGLQALAQGDEFGLTNIINNGGDNGGQQQQQQHHHHHHPPFGPLRLLPPYATFPGLLVDTSDIPAPFDDDAFDVDSFVDTTSLRRNRRRPSPAVRASYQRNRSNNASQTISFRLGSSASSAPREFAVPSSSIMTRSQTVNPTEVVTSSTSASSSRRRTEDVNNGPRTRSRRRLR

SEQ ID NO: 4471 - protein, 139 aa, Arabidopsis thaliana
MASTFVCSLPNPFFAFPVKATTPSTANHTLLGSRRGCLRIKAISTKWEPTKVVPQADRVLVRLEDLPIKSSGGVLLPKAAVKFERYLTGEIISVGSEVGQQVGPGKRVLFSDVSAYEVDLGTDARHCFCKESDLLALVE

SEQ ID NO: 4472 - protein, 93 aa, Arabidopsis thaliana
MASYYSGFLGCEEPHFLESCSLCRKHLGLNSDIFMYRGDKAFCSNECREEQIESDEAKERKWKKSSRSLRKNSSETKESAAGNTVRTGTLVVA

SEQ ID NO: 4473 - protein, 400 aa, Arabidopsis thaliana
MNLVKNRDDETCRRTEERKNPGENGNLNSSSVDHRFTSASRAFTQKKLDDLKSLFVSLASKSHSNDQYVSYPVFQVLTICVSDLESFLDIKSCICYMKIVIKILAFRSKILNFDQQVPSANAIFFHGDKVQDTGNHVIERLYDLQKVAEIIVSKFGNSVNAWVVEASVFNGPFAIYKDFVPSVNHMGAPKSYSPVGFPASSSIVSLLSSCLHEVLKEGTDVCLIDQIASVHHCPKTIVLGFSKGGVVMNQLMSEISSLDTNFAKTSSAMVEESTSQHEKIQIIPASKESFLNSISEVHYIDVGLNSSGAYITDHNVVQRISQRLARGADSLRIVIHGTPRQWCDELRGWIRKEKDELVRLLKAETENSGGKLQVCERFYFSDRLADLQMHFEIIDAMDVS

SEQ ID NO: 4474 - protein, 930 aa, Arabidopsis thaliana
MSRRVRRKLEEEKGKDKVVVLPSYPETSISNEEDLVAPELLHGFVDWISLPYDTVLQLFTCLNYRDRASLASTCKTWRCLGASSCLWTSLDLRPHKFDASMAASLASRCVNLHYLRFRGVESADSLIHLKARNLIEVSGDYCKKITDATLSMIVARHEALESLQLGPDFCERITSDAIKAVAFCCPKLKKLRLSGIRDVTSEAIEALAKHCPQLNDLGFLDCLNIDEEALGKVVSVRYLSVAGTSNIKWSIASNNWDKLPKLTGLDVSRTDIGPTAVSRFLTSSQSLKVLCALNCHVLEEDESLISYNRFKGKVLLALFTNVFDGLASIFADNTKKPKDIFAYWRELMKTTKDKTINDFIHWIEWIISHTLLRTAECNPEGLDDFWLNEGAALLLNLMQSSQEDVQERSATGLATFVVVDDENASIDCGRAEAVMKDGGIRLLLELAKSWREGLQSEAAKAIANLSVNANIAKSVAEEGGIKILAGLAKSMNRLVAEEAAGGLWNLSVGEEHKNAIAQAGGVKALVDLIFRWPNGCDGVLERAAGALANLAADDKCSMEVAKAGGVHALVMLARNCKYEGVQEQAARALANLAAHGDSNNNNAAVGQEAGALEALVQLTKSPHEGVRQEAAGALWNLSFDDKNRESISVAGGVEALVALAQSCSNASTGLQERAAGALWGLSVSEANSVAIGREGGVPPLIALARSEAEDVHETAAGALWNLAFNPGNALRIVEEGGVPALVHLCSSSVSKMARFMAALALAYMFDGRMDEYALMIGTSSSESTSKNISLDGARNMALKHIEAFVLSFIDPHIFESPVVSSTPTMLAQVTERARIQEAGHLRCSGAEIGRFVTMLRNPDSTLKACAAFALLQFTIPGGRHAMHHVSLMQNGGESRFLRSAAASAKTPREAKIFTKILLRNLEHHQAESSI

SEQ ID NO: 4475 - protein, 244 aa, Arabidopsis thaliana
MADGNASSRYVKLRKEQAPVEEDITPGELNQPIDVPQLNVRKCHECMQVLPETYEPPSDENWTTGIFGCAEDPESCRTGLFCPCVLFGRNIEAVREEIPWTQPCVCHAVCVEGGMALAAVTALFSGYIDPQTTVVICEGLFFAWWMCGIYSGLFRQELQKKYHLKNAPCDHCMVHCCLHWCALCQEHREMKNHLSDTEASSSTTMDPPPVQEMNTEERRDASSSSSSSPSSAKSQHNDLEMVPL

SEQ ID NO: 4476 - protein, 494 aa, Arabidopsis thaliana
MSLDKVLEDEVVEDTGESQVFNLLNPEFVDFDTCLDPITNELPTSANQKALFRTHSQKERVERVRAILSGRSIENNRRTETTKPAGELRREKTPAKKGNSNSSSVDHRFTSASRAFTQKKLDDLKSLFVSLASKSHSNDQYVSYPVFQEYFGLSGSLGERIFDMVTQHRKDDKMTFEDLVIAKMTFEDLVIAKSTLPLEFLGSSRILSKIAEVKRGIRKMGDPFGGRFGGFRGSLFGGRDPFDDPFFSRPFEDLLEPSNTFSSGASFSNAHKNNGGRGLTIEELPSDEEVEERKDIGIDDQEHASSVNKPSVEHPEDDSDAERKIQNVNQRSDFNRREGTQSRANTFRHHISKVTYGGIHGAYYTSTRTRRKDGDGMVVEESKEADKTTGEATHRISRGINDKGHSVTRKLNSSGGVESTQTLHNLDEDELSGFEEAWKGNSSLGKHEFTGSDNSFGGWVLPSLDQIRRQTDQSQTGSSRSATGAKKVVRINIE

SEQ ID NO: 4477 - protein, 916 aa, Arabidopsis thaliana
MASTAAEQDERKIVSVASNASQDIKTAAAASRISSQNGASPSPSLNSKDFIVSAAANIASQPLQNYDSNVWGVLTAISSNARKRRQGINILLTSDEHCLGRLPCHASYQVESNAISGNHCKVFRKPVTGGDGDDVTVFMVDTSTNGTFLNWERLTKNGPEVRVQHGDIISLAVPPEHEKAFAFVYREVLGNNPALSCMNRKRKAEDTTCEIKRQKGIGISGPNGPISLDDFKSLQRSNTELRKQLEAQVLTIDTLRNESRSIVEHHESDYLSISTEISLHLQEIKQIKESTAKSFHNELIELRDQLDTKQKELAQVNKLSAEQKNSIDELGERVSASLQTLSEANEVIQSQKASIAELKTGLDEERNQRREERETAIAELKAAIHRCQIEAQEELKRFSDAAMRHEREQQEVINKMKESEKEKSMQVETLMSKLEDTRQRLVCSENRNRLLEAQVSEEQLAFADAQKKLEELDLQVKRLQKDLDSEKQAAREEAWAKVSALELEISAAVRDLDVERQRHRGARERIMLRETQMRAFYSTTEEISALFAKQQEQLKTMQRTLEDEDNCDNTSLDIDLNPINRSPNRANTQGDKRATSHLNFAARASSSTSGQRSTRNEVVDTSCEDADATQKHDCEIMSQEGQNTQEAEYPSSDKVAKGGFGSDIEGIGTAPTSGTDPVGTEQVNETQSPGNDYERNDHLRKSIILAGDTMQIDCETQVHESVQIEGAVLLLRNPNDRRDTQDIEGVGTIGTSDLLASEVAGSWANSTNPSVHGENETERSREDEESQTQKIKEVTIVQDSAGQIGESQTKPTSPGVLVTNKDDAERGVINEPVGITDQGKIKHGTRSDSETESCSDSDDDHEKEKHNPVSDSDTEGSDMNDDKGSLSSDPDTERSHEVDGDQKKQVDTMDEDDKAT

SEQ ID NO: 4478 - protein, 329 aa, Arabidopsis thaliana
MEAPPPSSDPYKFLNITLNSDGSLTRHRDFPKLPPTEQSKDIPLNQTNNTFIRIFKPRNIPPESKLPILVYFHGGGFILYSAASAPFHESCTKMADRLQTIILSVEYRLAPEHRLPAAYEDAVEAILWLRDQARGPINGGDCDTWLKDGVDFSKCYVMGSSSGGNIVYNVALRVVDTDLSPVKIQGLIMNQAFFGGVEPSDSESRLKDDKICPLPATHLLWSLCLPDGVDRDHVYSNPIKSSGPQEKDKMGRFPSTLINGYGGDPLVDRQRHVAEMLKGRGVHVETRFDKDGFHACELFDGNKAKALYETVEAFMKSCSSTGPSSNSNM

SEQ ID NO: 4479 - protein, 348 aa, Arabidopsis thaliana
MDRRDAMGLSGSGSYYIHRGLSGSGPPTFHGSPQQQQGLRHLPNQNSPFGSGSTGFGSPSLHGDPSLATAAGGAGALPHHIGVNMIAPPPPPSETPMKRKRGRPRKYGQDGSVSLALSSSSVSTITPNNSNKRGRGRPPGSGKKQRMASVGELMPSSSGMSFTPHVIAVSIGEDIASKVIAFSQQGPRAICVLSASGAVSTATLIQPSASPGAIKYEGRFEILALSTSYIVATDGSFRNRTGNLSVSLASPDGRVIGGAIGGPLIAASPVQVIVGSFIWAAPKIKSKKREEEASEVVQETDDHHVLDNNNNTISPVPQQQPNQNLIWSTGSRQMDMRHAHADIDLMRG

SEQ ID NO: 4480 - protein, 449 aa, Arabidopsis thaliana
MADQTKKRYVTSEDLKKHNKPGDLWISIQGKVYDVSDWVKSHPGGEAAILNLAGQDVTDAFIAYHPGTAWHHLEKLHNGYHVRDHHVSDVSRDYRRLAAEFSKRGLFDKKGHVTLYTLTCVGVMLAAVLYGVLACTSIWAHLISAVLLGLLWIQSAYVGHDSGHYTVTSTKPCNKLIQLLSGNCLTGISIAWWKWTHNAHHIACNSLDHDPDLQHIPIFAVSTKFFNSMTSRFYGRKLTFDPLARFLISYQHWTFYPVMCVGRINLFIQTFLLLFSKRHVPDRALNIAGILVFWTWFPLLVSFLPNWQERFIFVFVSFAVTAIQHVQFCLNHFAADVYTGPPNGNDWFEKQTAGTLDISCRSFMDWFFGGLQFQLEHHLFPRLPRCHLRTVSPVVKELCKKHNLPYRSLSWWEANVWTIRTLKNAAIQARDATNPVLKNLLWEAVNTHG

SEQ ID NO: 4481 - protein, 566 aa, Arabidopsis thaliana
MSSAGVALSPVRSEPLIMPLVRANSCLDSYPDDTIMIYLTLPGSVIPMRVLESDSIESVKLRIQSYRGFVVRNQKLVFGGRELARSNSNMRDYGVSEGNILHLVLKLSDLQVLDVKTTCGKHCRFHVERGRNIGYVKKQISKKRGDFVDPDEQEILYEGEKLEDQSLINDICRNDDSVLHLLVRRSAKVRVKPVEKNFELSIVAPQAKDKKGREAKSIVPPKKLSLEPVVVNSKAKVPLVVKDMIQSASDGLKSGNSPVRSSEGTGGAYFMQGPSGNKFVGVFKPIDEEPMAENNPQGLPLSPNGEGLKKGTKVGEGALREVAAYILDHPKSGNKSMFGEEIGFAGVPPTAMIECLHPGFNHPKGIKTKIGSLQMFTENDGSCEDMGPLSFPVEEVHKISVLDIRLANADRHGGNILMTKDESGKLVLVPIDHGYCLPESFEDCTFEWLYWPQARKPYSAETQEYIRSLDAEEDIDLLKFHGWKMPAETAQTLRISTMLLKKGVERGLTAFEIGTIMCRETLSKKSLVEEMVEEAQEAVLPGTSEAAFLEALSDVMDYHLDHSQEH

SEQ ID NO: 4482 - protein, 369 aa, Arabidopsis thaliana
MDATKWTQGFQEMMNVKPMEQIMIPNNNTHQPNTTSNARPNTILTSNGVSTAGATVSGVSNNNNNTAVVAERKARPQEKLNCPRCNSTNTKFCYYNNYSLTQPRYFCKGCRRYWTEGGSLRNVPVGGSSRKNKRSSSSSSSNILQTIPSSLPDLNPPILFSNQIHNKSKGSSQDLNLLSFPVMQDQHHHHVHMSQFLQMPKMEGNGNITHQQQPSSSSSVYGSSSSPVSALELLRTGVNVSSRSGINSSFMPSGSMMDSNTVLYTSSGFPTMVDYKPSNLSFSTDHQGLGHNSNNRSEALHSDHHQQGRVLFPFGDQMKELSSSITQEVDHDDNQQQKSHGNNNNNNNSSPNNGYWSGMFSTTGGGSSW

SEQ ID NO: 4483 - protein, 608 aa, Arabidopsis thaliana
METNSSGEDLVIKTRKPYTITKQRERWTEEEHNRFIEALRLYGRAWQKIEEHVATKTAVQIRSHAQKFFSKVEKEAEAKGVAMGQALDIAIPPPRPKRKPNNPYPRKTGSGTILMSKTGVNDGKESLGSEKVSHPEMANEDRQQSKPEEKTLQEDNCSDCFTHQYLSAASSMNKSCIETSNASTFREFLPSREEGSQNNRVRKESNSDLNAKSLENGNEQGPQTYPMHIPVLVPLGSSITSSLSHPPSEPDSHPHTVAGDYQSFPNHIMSTLLQTPALYTAATFASSFWPPDSSGGSPVPGNSPPNLAAMAAATVAAASAWWAANGLLPLCAPLSSGGFTSHPPSTFGPSCDVEYTKASTLQHGSVQSREQEHSEASKARSSLDSEDVENKSKPVCHEQPSATPESDAKGSDGAGDRKQVDRSSCGSNTPSSSDDVEADASERQEDGTNGEVKETNEDTNKPQTSESNARRSRISSNITDPWKSVSDEGRIAFQALFSREVLPQSFTYREEHREEEQQQQEQRYPMALDLNFTAQLTPVDDQEEKRNTGFLGIGLDASKLMSRGRTGFKPYKRCSMEAKESRILNNNPIIHVEQKDPKRMRLETQAST

SEQ ID NO: 4484 - protein, 413 aa, Arabidopsis thaliana
MRVLIRPNFLSNLIRYCSRGTHSHDRSLRSVLSSNMIRLYTTGMEPQLSPDLIKIMDQRLSAIEHRNAVLQKLINQPEYSPEEFSRANKELRKLRDSMLLINDLRAKQKEIDGLKSLVSESSDDKDMLDLAVGELDEAVEEEKRLQTLLLKSLLPKDEADERDCILEVRAGTGGEEASLFAMDIFRMYERYSQKKGWKFDIVDITESDMKGYKEASAAICGASVYGKLKFESGIHRVQRIPITEKSGRIHTSAISVAILPQADEVDVQLRNEDLRIDTYRSGGSGGQHANTTNSAVRIIHLPTGMMVSIQDERSQHMNRAKALKVLCARLYEIERLRIQSSRSKLRSDQIGSGDRSGRIRTYNFPQGRVTDHRVGITHHAIEDMMQGENLDMFIDALLLRQEMDAIASFSSTS

SEQ ID NO: 4485 - protein, 729 aa, Arabidopsis thaliana
MEETFVPFEGIKNDLKGRLMCYKQDWTGGFKAGFRILAPTTYIFFASAIPVISFGEQLERSTGNSAKSFYLALFQLRNLKLDSEIFADGVLTAVQTLASTAICGMIHSIIGGQPLLILGVAEPTVIMYTFMFNFAKARPELGRDLFLAWSGWVCVWTALMLFVLAICGACSIINRFTRVAGELFGLLIAMLFMQQAIKGLVDEFRIPERENQKLKEFLPSWRFANGMFALVLSFGLLLTGLRSRKARSWRYGTGWLRSLIADYGVPLMVLVWTGVSYIPAGDVPKGIPRRLFSPNPWSPGAYGNWTVVKEMLDVPIVYIIGAFIPASMIAVLYYFDHSVASQLAQQKEFNLRKPSSYHYDLLLLGFLTLMCGLLGVPPSNGVIPQSPMHTKSLATLKYQLLRNRLVATARRSIKTNASLGQLYDNMQEAYHHMQTPLVYQQPQGLKELKESTIQATTFTGNLNAPVDETLFDIEKEIDDLLPVEVKEQRVSNLLQSTMVGGCVAAMPILKMIPTSVLWGYFAFMAIESLPGNQFWERILLLFTAPSRRFKVLEDYHATFVETVPFKTIAMFTLFQTTYLLICFGLTWIPIAGVMFPLMIMFLIPVRQYLLPRFFKGAHLQDLDAAEYEEAPALPFNLAAETEIGSTTSYPGDLEILDEVMTRSRGEFRHTSSPKVTSSSSTPVNNRSLSQVFSPRVSGIRLGQMSPRVVGNSPKPASCGRSPLNQSSSN

SEQ ID NO: 4486 - protein, 1520 aa, Arabidopsis thaliana
MDWIHKSTPFMEPSNLAKLVQGNVPLQPHDSHSSLTDLDMDLREVYFLILHFLSIGPCERTFGHLRDEILEKGLLPRRYHSWWSRSGIYSGRADDDGISLPLSYDNLIERYPHIEKDHLVKLLKQLILNPSFPSHMRVEGNAPNAADVPTLLGSGTFSLVDRSNNIESQKARHVASYLRWPHMHADQVRGLSLREIGGGFRKHHRAPSILSACHAIAKPSTMVQKMQNIKKLRGHRNAVYCAIFDRSGRYVITGSDDRLVKIWSMETALCLASCRGHEGDITDLAVSSNNALVASASNDFVIRVWRLPDGMPISVLRGHTGAVTAIAFSPRQASVYQLLSSSDDGTCRIWDARYSQWLPRIYVPSPSDANTGSTSNASQSHQILCCAYNANGTIFVTGSSDSNARVWSASKPNLDDAEQPTHELDVLRGHENDVNYVQFSGCAVAPKSSTADALKEDSYPKFKNSWFCHDNIVTCSRDGSAIIWTPRSRKFHGKSGRWMKGYHLKVPPPPLPPQPPRGGPRQRFLPTPRGVNMIIWSLDNRFVLAAIMDCRICVWNAADGSLVHCLTGHSESSYVLDVHPFNPRIAMSAGYDGKTIIWDIWEGIPIKVYEIGRFKLVDGKFSQDGTSIVLSDDVGQIYFLNTGQGESQKNAKYDQFFLGDYRPLIRDTNGHVLDQETQLLPHRRNLQDLLCDSSMIPYPEPDQTMFQQRRLGALGVEWRPSSIKFSVGPDFSLGQDYIMPPLADLDRLIEPLPEFIDAMYWEPEHEVLSDDNDSEYNAEVSSDGARASPCSNSSNELECSSEDSDVENIHESSYHWKRRRKHPKVNVSTSSGRRDKRILDENDSSNSGIKRTKNRRIVVKASKRKHSDVKASRPQRAAAQNARSLLSKISGSSSDEVDDDNDSSNSESDRSIPTLRQLDKPSQMLESLSNDKQKKRLIVKISVKKPAESMGSKGDVINQADLEQLSSKPLEENHRVIGIYSREPGSSSVDAKGDSGCQSIPYSMNTPQREKADNQLIRSSDQDQNMCKWREEIPVCEPTELTAPENIEEAQPFYGDEADEILPKKVRRLRLKLRHPNSPRKLEPDEVADDLADGGDGFASIAPSFMNPIMDSEPVIDSVRDSSAHNFEFGEATADVIRRKRSIRSESSTRNSALRIRLGSGSVDKIKKQGIPSTSVYDDASLEEWPSTSKAGSRSRSASVSKPSLHTGIRLNSVSGKISWLLLSEHEEGCRYIPQLGDEVIYFKQGHQEFLKTKELNDRDRSRYLPRNLGAVEICKVEKLNYDTYPGSGDSCCKMTLRVLDSSSSHASRKEFQLTLPELINFPDFIVEKTRYDAAIQTNWKIGNECRVWWRDATGEGGAWWEGRIESSQVKSTDFPESPWERYRVVYETGETSLHSPWEFDNPEFPWEKSTIEDERREKLLSLFAGLVKSISKHQDSYGIQKLNEAAQKMDFCNRFPVPLYPELIHERLENQYYRSIESFKHDVDAMLSNAELYFVRSAHMLSKIKRLRDKLTKTLRKLI

SEQ ID NO: 4487 - protein, 312 aa, Arabidopsis thaliana
MSANSHPPNSKNVLCNAAAGAAAGVVAATFVCPLDVIKTRFQVHGLPKLGDANIKGSLIVGSLEQIFKREGMRGLYRGLSPTVMALLSNWAIYFTMYDQLKSFLCSNDHKLSVGANVLAASGAGAATTIATNPLWVVKTRLQTQGMRVGIVPYKSTFSALRRIAYEEGIRGLYSGLVPALAGISHVAIQFPTYEMIKVYLAKKGDKSVDNLNARDVAVASSIAKIFASTLTYPHEVVRARLQEQGHHSEKRYSGVRDCIKKVFEKDGFPGFYRGCATNLLRTTPAAVITFTSFEMVHRFLVTHIPSEQSSIL

SEQ ID NO: 4488 - protein, 468 aa, Arabidopsis thaliana
MYARNPPLNGSQSAQAPDWTPADADTGLQESMWRLGLGSDSYPERPGAPDCAYYMRTGVCGYGNRCRYNHPRDRASVEATVRATGQYPERFGEPPCQFYLKTGTCKFGASCKFHHPKNAGGSMSHVPLNIYGYPVREGDNECSYYLKTGQCKFGITCKFHHPQPAGTTVPPPPASAPQFYPSVQSLMPDQYGGPSSSLRVARTLLPGSYMQGAYGPMLLTPGVVPIPGWSPYSAPVSPALSPGAQHAVGATSLYGVTQLTSTTPSLPGVYPSLSSPTGVIQKEQAFPERPGEPECQYYLKTGDCKFGTSCKFHHPRDRVPPRANCVLSPIGLPLRPGVQRCTFYVQNGFCKFGSTCKFDHPMGTIRYNPSASSLADAPVAPYPVSSLLGALAAAPSSSSTELIAGGAKDAYMTGVPTSRSTSNISAGLIFSQSGGSIPFSELQLSSQSSLPLTGSRITRQGREIRRSF

SEQ ID NO: 4489 - protein, 407 aa, Arabidopsis thaliana
MSFKSLIQDMRGELGSISRKGFDVRFGYGRSRSQRVVQDTSVPVDAFKQSCWASMPPELLRDVLMRIEQSEDTWPSRKNVVSCAGVCRNWREIVKEIVRVPELSSKLTFPISLKQPGPRGSLVQCYIMRNRSNQTYYLYLGLNQAAASNDDGKFLLAAKRFRRPTCTDYIISLNCDDVSRGSNTYIGKLRSNFLGTKFTVYDAQPTNPGTQVTRTRSSRLLSLKQVSPRIPSGNYPVAHISYELNVLGSRGPRRMQCVMDAIPASAVEPGGTAPTQTELVHSNLDSFPSFSFFRSKSIRAESLPSGPSSAAQKEGLLVLKNKAPRWHEQLQCWCLNFNGRVTVASVKNFQLVAAPENGPAGPEHENVILQFGKVGKDVFTMDYQYPISAFQAFTICLSSFDTKIACE

SEQ ID NO: 4490 - protein, 136 aa, Arabidopsis thaliana
MSVSLFTAFTVLSLCLHTSTSEFQLSTISAAPSFLPEAPSSFSASTPAMSPDTSPLFPTPGSSEMSPSPSESSIMPTIPSSLSPPNPDAVTPDPLLEVSPVGSPLPASSSVCLVSSQLSSLLLVLLMLLLAFCSFF

SEQ ID NO: 4491 - protein, 535 aa, Arabidopsis thaliana
MFKRVDEFNLVSSTIDHRIFKSRMDGSGTGSRSGVESILPNYKLGRTLGIGSFGRVKIAEHALTGHKVAIKILNRRKIKNMEMEEKVRREIKILRLFMHPHIIRLYEVIETPTDIYLVMEYVNSGELFDYIVEKGRLQEDEARNFFQQIISGVEYCHRNMVVHRDLKPENLLLDSKCNVKIADFGLSNIMRDGHFLKTSCGSPNYAAPEVISGKLYAGPEVDVWSCGVILYALLCGTLPFDDENIPNLFKKIKGGIYTLPSHLSPGARDLIPRMLVVDPMKRVTIPEIRQHPWFQAHLPRYLAVPPPDTVQQAKKIDEEILQEVINMGFDRNHLIESLRNRTQNDGTVTYYLILDNRFRASSGYLGAEFQETMEGTPRMHPAESVASPVSHRLPGLMEYQGVGLRSQYPVERKWALGLQSRAHPREIMTEVLKALQDLNVCWKKIGHYNMKCRWVPNSSADGMLSNSMHDNNYFGDESSIIENEAAVKSPNVVKFEIQLYKTRDDKYLLDLQRVQGPQFLFLDLCAAFLAQLRVL

SEQ ID NO: 4492 - protein, 53 aa, Arabidopsis thaliana
MAPPPGLYSGTSTLALVARASAFGLGLIYGNIKLKALKIKKNSQIKAEAKAHH

SEQ ID NO: 4493 - protein, 215 aa, Arabidopsis thaliana
MVYLHSSISVCNSVDPMIMSHSSPKSRNTRNKSSSSPTCSKFPVCDGSQSAAIDVVILIAVITACGFLFFPYVKLITLKSIEVFSDLSLLVKQEILQNPIVYGSLALSIFCAAISTWLVILLCTMQRCGKPNCKGLRKAVEFDIQLETEECVKSSSNKRGMFELPRVHHRELEAELKKMAPPNGRAVLVFRARCGCSVRRLVVSGPKKQQRKIKK

SEQ ID NO: 4494 - protein, 272 aa, Arabidopsis thaliana
MESNSFFFDPSASHGNSMFFLGNLNPVVQGGGARSMMNMEETSKRRPFFSSPEDLYDDDFYDDQLPEKKRRLTTEQVHLLEKSFETENKLEPERKTQLAKKLGLQPRQVAVWFQNRRARWKTKQLERDYDLLKSTYDQLLSNYDSIVMDNDKLRSEVTSLTEKLQGKQETANEPPGQVPEPNQLDPVYINAAAIKTEDRLSSGSVGSAVLDDDAPQLLDSCDSYFPSIVPIQDNSNASDHDNDRSCFADVFVPTTSPSHDHHGESLAFWGWP

SEQ ID NO: 4495 - protein, 921 aa, Arabidopsis thaliana
MVLGLSSKNRRCSSVQVDYLIHIHDIKPWPPSQSLRSLRSVVIQWENGDRNSGTTSVVAPSLGSVIGEGKIEFNESFKLPLTLLKDVSARGKGGDVFFKNVLELNLYEPRREKTHQLLATATIDLAVYGVVKESFSLTAQMNSKRSYRNATQPVLYLTIQPVSRRRASSSSMNSLKDEAKNGGESVSALMNEEYYKEAEIASITDDDISSHSSLTVSSSTLESNGGFSVRTEEEEHERINKNPRGNGHERSKSVSESRQRQIADQIPSRSSSVDLSSVFHLPEGISDSAPNTSLSGLEHCANVFITDTNESSKLASNGQHNNGEAKSVPLQIDNLSENASPRASVNSQDLTSDQEPESIVEKSRKVKSVRSSLDINRSNSRLSLFSERKEAKVYPNSTHDTTLESKIKNLESRVKKLEGELCEAAAIEAALYSVVAEHGSSSSKVHAPARRLLRLYLHACRETHLSRRANAAESAVSGLVLVAKACGNDVPRLTFWLSNTIVLRTIISDTSAEEELPVSAGPGPRKQKAERETEKRSSLKWKDSPLSKKDIKSFGAWDDPVTFITALEKVEAWIFSRVVESIWWQTLTPRMQSSAASTREFDKGNGSASKKTFGRTPSSTNQELGDFSLELWKKAFREAHERLCPLRGSGHECGCLPIPARLIMEQCVARLDVAMFNAILRDSDDNFPTDPVSDPIADLRVLPIPSRTSSFGSGAQLKNSIGNWSRWLTDLFGIDDEDDDSSDENSYVEKSFKTFNLLKALSDLMMLPKDMLLNSSVRKEVCPMFGAPLIKRVLNNFVPDEFCPDPVPDAVLKSLESEEEAEKSIITSYPCTAPSPVYCPPSRTSISTIIGNFGQPQAPQLSRIRSSITRKAYTSDDELDELSSPLAVVVLQQAGSKKINNGDADETIRYQLLRECWMNGE

SEQ ID NO: 4496 - protein, 296 aa, Arabidopsis thaliana
MENPAKRVLMTSNGDEVSRNIAFHLAKHGCKLVMMGNEGSLRSIVDKIRDSIEGAFPADVIALDMESDSEVAFHAAVQKAWELSGHFDAFLNSYTYQGLICFLFFTTLPLMLLCVDHSFIQQSFFLAGKVQDILQVSQDEFHRITKINLTAPWFLLKAVATRMKDHGSGGSIVFMATIASGERALYPGADAYASTSAAIHQLVRASAMSLGKHKIRVNMISRGLHLDDEYTASVGRDRAQKLVKDAAPLGQWLNPDTDLYSTVIYLISDGSRFMTGTTVLVDGAQSLTRPRLKSYM

SEQ ID NO: 4497 - protein, 505 aa, Arabidopsis thaliana
MNEEGCVPHNSDVVKQKSIDQRAPLSGEPKCVICSRYGEYICDETNDDVCSLECKQALLRRVDSARVFPATDECFYVRDPGSSSHDAQLLRRKLDIHVQGQGSAVPPPVLTFTSCGLPPKLLLNLETAGYDFPTPIQMQAIPAALTGKSLLASADTGSGKTASFLVPIISRCTTYHSEHPSDQRRNPLAMVLAPTRELCVQVEDQAKMLGKGLPFKTALVVGGDPMSGQLYRIQQGVELIIGTPGRVVDLLSKHTIELDNIMTFVLDEVDCMLQRGFRDQVMQIFQALSQPQVLLFSATISREVEKVGGSLAKEIILVSIGNPNKPNKAVNQLAIWVDAKQKKQKLFDILRSQNHFKPPAVVYVSSRVGADLLANAITVVTGVKALSIHGEKPMKERRDVMGSFLGGEVPVLVSTGVLGRGVDLLVVRQVIVFDMPSTIKEYIHVIGRASRMGEKGTAIVFVNEDDRNLFPDLVAALKSSGAAIPKELINLTSREMHNKKRRVGY

SEQ ID NO: 4498 - protein, 366 aa, Arabidopsis thaliana
MALSAIGFEGYEKRLEVTFFEPSIFQDSKGLGLRALTKSQLDEILTPAACTIVSSLSNDQLDSYVLSESSFFVYPYKVIIKTCGTTKLLLSIPPLLKLAGELSLSVKSVKYTRGSFLCPGGQPFPHRSFSEEVSVLDGHFTQLGLNSVAYLMGNDDETKKWHVYAASAQDSSNCNNNVYTLEMCMTGLDREKAAVFYKDEADKTGSMTDNSGIRKILPKSEICDFEFEPCGYSMNSIEGDAISTIHVTPEDGFSYASFEAVGYDFNTLDLSQLVTRVLSCFEPKQFSVAVHSSVGANSYKPEITVDLEDYGCRERTFESLGEESGTVMYQTFEKLGKYCGSPRSTLKCEWSSNNSCSSEDEKDEGI

SEQ ID NO: 4499 - protein, 527 aa, Arabidopsis thaliana
MGSCLSAESRSPRPGSPCSPAFSVRKRKNSKKRPGSRNSSFDYRREEPLNQVPGRMFLNGSTEVACIYTQQGKKGPNQDAMVVWENFGSRTDTIFCGVFDGHGPYGHMVAKRVRDNLPLKLSAYWEAKVPVEGVLKAITTDTVNNVTNINNPEDAAAAAAFVTAEEEPRTSADMEEENTETQPELFQTLKESFLKAFKVMDRELKFHGSVDCFCSGTTAVTLIKQGQYLVVGNVGDSRAVMGTRDSENTLVAVQLTVDLKPNLPGWIILCECMMLSCGCMMDPLIMFIGFFFIPSIELAAEAERIRKCRGRVFALRDEPEVCRVWLPNCDSPGLAMARAFGDFCLKDFGLISVPDVSFRQLTEKDEFIVLATDGIWDVLSNEDVVAIVASAPSRSSAARALVESAVRAWRYKYPTSKVDDCAAVCLYLDSSNTNAISTASSISKLEDGEEEELKATTEDDDASGPSGLGRSSTVRSGKEIALDESETEKLIKEADNLDSEPGTEYSALEGVARVNTLLNLPRFVPGK

SEQ ID NO: 4500 - protein, 1388 aa, Arabidopsis thaliana
MTMDADAMETETTDQVSASPLHFARSYQVEALEKAIKQNTIVFLETGSGKTLIAIMLLRSYAYLFRKPSPCFCVFLVPQVVLVTQQAEALKMHTDLKVGMYWGDMGVDFWDSSTWKQEVDKYEVLVMTPAILLDALRHSFLSLSMIKVLIVDECHHAGGKHPYACIMREFYHKELNSGTSNVPRIFGMTASLVKTKGENLDSYWKKIHELETLMNSKVYTCENESVLAGFVPFSTPSFKYYQHIKIPSPKRASLVEKLERLTIKHRLSLGTLDLNSSTVDSVEKRLLRISSTLTYCLDDLGILLAQKAAQSLSASQNDSFLWGELNMFSVALVKKFCSDASQEFLAEIPQGLNWSVANINGNAEAGLLTLKTVCLIETLLGYSSLENIRCIIFVDRVITAIVLESLLAEILPNCNNWKTKYVAGNNSGLQNQTRKKQNEIVEDFRRGLVNIIVATSILEEGLDVQSCNLVIRFDPASNICSFIQSRGRARMQNSDYLMMVESGDLLTQSRLMKYLSGGKRMREESLDHSLVPCPPLPDDSDEPLFRVESTGATVTLSSSVSLIYHYCSRLPSDEYFKPAPRFDVNKDQGSCTLYLPKSCPVKEVKAEANNKVLKQAVCLKACIQLHKVGALSDHLVPDMVVAETVSQKLEKIQYNTEQPCYFPPELVSQFSAQPETTYHFYLIRMKPNSPRNFHLNDVLLGTRVVLEDDIGNTSFRLEDHRGTIAVTLSYVGAFHLTQEEVLFCRRFQITLFRVLLDHSVENLMEALNGLHLRDGVALDYLLVPSTHSHETSLIDWEVIRSVNLTSHEVLEKHENCSTNGASRILHTKDGLFCTCVVQNALVYTPHNGYVYCTKGVLNNLNGNSLLTKRNSGDQTYIEYYEERHGIQLNFVDEPLLNGRHIFTLHSYLHMAKKKKEKEHDREFVELPPELCHVILSPISVDMIYSYTFIPSVMQRIESLLIAYNLKKSIPKVNIPTIKVLEAITTKKCEDQFHLESLETLGDSFLKYAVCQQLFQHCHTHHEGLLSTKKDGMISNVMLCQFGCQQKLQGFIRDECFEPKGWMVPGQSSAAYSLVNDTLPESRNIYVASRRNLKRKSVADVVESLIGAYLSEGGELAALMFMNWVGIKVDFTTTKIQRDSPIQAEKLVNVGYMESLLNYSFEDKSLLVEALTHGSYMMPEIPRCYQRLEFLGDSVLDYLITKHLYDKYPCLSPGLLTDMRSASVNNECYALVAVKANLHKHILYASHHLHKHISRTVSEFEQSSLQSTFGWESDISFPKVLGDVIESLAGAIFVDSGYNKEVVFASIKPLLGCMITPETVKLHPVRELTELCQKWQFELSKAKDFDSFTVEVKAKEMSFAHTAKASDKKMAKKLAYKEVLNLLKNSLDY

SEQ ID NO: 4501 - protein, 321 aa, Arabidopsis thaliana
MKSLVAHFSTPLITARLVPRCIIHRASISAVSFSTVRRRFSPLTMASAAQSSSQAVSYGSGNSDTDVFKLIQAHEEKAARLSPVEEIRTVLNGSICGMLSTFSQKYEGYPSGSMVDFACDADGSPILAVSSLAVHTKDLLANPKCSLLIARDPEDRTGLRITLHGDAVLVSEKDQAAVRSAYLAKHPKAFWVDFGDFSFMRIEPKVVRYVSGVATAFLGSGEFSKEEYQAAKVDPIAQYAKPVTSHMNKDHEEDTKAIVHNITSIPVESALMLDLDSLGFNVKATLQGNTFKLRVPFPRRAQDRKDVKTLIVEMLQAAKSN

SEQ ID NO: 4502 - protein, 554 aa, Arabidopsis thaliana
MGRNLGSAFRQELANLDKDPDSHKTAMSNLRSIVKDLDAKVVHVFVAQLSDVKEIGLESGGYTVSLFEDLARAHGVKIAPHIDIIMPAIIRTLSSSEGSLRVQQACSRAVAAMARYGIDPTTPEDKKTNVIHSLCKPLSDSLIDSQHQQHLALGSALCLKSLVDCDNWRSASSEMVNNVCQSLAVALEATSSEAKSHMALVMALSKHNPFTVEAYARLFVKSGLRILDLGVVEGDSQKRLLAIQMLNFLMKNLNPKSISSELELIYQEMEKYQKDQHYVKMAAHETMRQAERLICEADPMFDAENCKPRNSLSGSVKSTSSLREHDGSVYSRQDRSYVNDQDEYDVLFSGVASGRTLVSGSPLVTFGDNNQETGFVIESPRIGDQIQCSGVENGNIESVWFHQRNRSSEFNESVCSRTNRSRSSRRNTKKRQSGDICSKHHRHGFAQDPFTELLDNRQQLLQYSETSSSSSIYDTSGTTTPTNTTEDICEKPKTDLDSEAKLKTVETELDPRLGRSKGVLKLGLSVFSIAVAGFASFMWMYLQDDMMPPHLVPT

SEQ ID NO: 4503 - protein, 442 aa, Arabidopsis thaliana
MTLASDFGFPSAISSSFTILEERYHNNFPNTLCVSSGQESMNNNPVPCQVFPLVSGGSSGGNLFSSSSGFCNGVYVSSSSQARPSVSTVPRDRITVAHVSGEGQRQECPVETHSLQLINQPQEQKIMTWSSDQIRGFFDFPVPDPQAASSRTMVSSKEVLSKCEWPDWADQLISDDSLEPNWSELLGDPNVLNLYSKIETQSSDIARQEIVFRNQHQVDPSMEPFNAKSPPASSMTSKQRMRWTPELHEAFVEAINQLGGSERATPKAVLKLINSPGLTVYHVKSHLQKYRTARYKPELSKDTEEPLVKNLKTIEDIKSLDLKTSIEITEALRLQMKVQKQLHEQLEIQRSLQLQIEEQGRYLQMMIEKQQKMQENKKDSTSSSSMPEADPSAPSPNLSQPFLHKATNSEPSITQKLQNGSSTMDQSESTSGTSNRKRVRED

SEQ ID NO: 4504 - protein, 766 aa, Arabidopsis thaliana
MLRSLGLGLLLFALLALVSGDNDYVSCNCDDEGFLSVHTILECQRVSDLLIAIAYFSIPLELLYFISFSNVPFKWVLVQFIAFIVLCGMTHLLNAWTYYGPHSFQLMLWLTIFKFLTALVSCATAITLLTLIPLLLKWKVRELYLKQNVLELNEEVGLMKRQKEMSVQVRMLTREIRKSLDKHMILRTTLVELSKILDLQNSAVWMPNENRTEMHLTHELRANPMRSFRVIPINDPDVVQVRETKVVTILRKNSVLAVESSGCGGSEEFGPVAAIRMPMLHGLNFKGGTPEFVDTPYAIMVLVLPSANSRVWTDKEIEIAEVVADQVAVAISHASVLEESQLMREKLGIQNRALLRAKQNAMMASQARNTCQKVMSHGMRRPMHTILGLLSMFQSESMSLDQKIIVDALMKTSTVLSALINDVIDISPKDNGKSALEVKRFQLHSLIREAACVAKCLSVYKGYGFEMDVQTRLPNLVVGDEKRTFQLVMYMLGYILDMTDGGKTVTFRVICEGTGTSQDKSKRETGMWKSHMSDDSLGVKFEVEINEIQNPPLDGSAMAMRHIPNRRYHSNGIKEGLSLGMCRKLAQMMQGNIWISPKSHGQTQSMQLVLRFQTRPSIRRSILAGNAPELQHPNSNSILRGLRITLADDDDVNRTVTKRLLEKLGCEVTAVSSGFECLNALSNVEMSYRVVILDLQMPEMDGFEVAMKIRKFCGHHWPLIIALTASTEDHVRERCLQMGMNGMIQKPVLLHVMASELRRALQTASE

SEQ ID NO: 4505 - protein, 330 aa, Arabidopsis thaliana
MEEVEAANRSAIESCHGVLNLLSQRTSDPKSLTVETGEVVSKFKRVASLLTRGLGHGKFRSTNKFRSSFPQHIFLESPICCGNDLSGDYTQVLAPEPLQMVPASAVYNEMEPKHQLGHPSLMLSHKMCVDKSFLELKPPPFRAPYQLIHNHQQIAYSRSNSGVNLKFDGSGSSCYTPSVSNGSRSFVSSLSMDASVTDYDRNSFHLTGLSRGSDQQHTRKMCSGSLKCGSRSKCHCSKKRKLRVKRSIKVPAISNKIADIPPDEYSWRKYGQKPIKGSPHPRGYYKCSSVRGCPARKHVERCIDETSMLIVTYEGEHNHSRILSSQSAHT

SEQ ID NO: 4506 - protein, 606 aa, Arabidopsis thaliana [sequence omitted]

SEQ ID NO: 4507 - protein, 700 aa, Arabidopsis thaliana
MNNLSYLEPDYSEFVEVDPTGRYGRYNEVLGKGASKTVYRAFDEYEGIEVAWNQVKLYDFLQSPEDLERLYCEIHLLKTLKHKNIMKFYTSWVDTANRNINFVTELFTSGTLRQYRLRHKRVNIRAMKHWCRQILRGLHYLHSHDPPVIHRDLKCDNIFVNGNQGEVKIGDLGLAAILRKSHAAHCVGTPEFMAPEVYEEAYNELVDIYSFGMCILEMVTFDYPYSECTHPAQIYKKVMSGKKPDALYKVKDPEVKCFIEKCLATVSLRVSARELLDDPFLRIDDGEFDLRSVDMEDSVGPLYRQPHHLPDYYNYPSNSSSLNRQYSNGNYPSNSSSLNRQYSNGYNSHHEYQNGWAYNPAETEETHGIELFESRNNDDQEEEKKSGNVDITIKGKRRDDGGLFLRLRIADKEGRVRNIYFPFDIETDTALSVATEMVAELDMDDHGVTKIANMIDGEISSLVPSWRPGPEFEECLAAAAAANAASICNNCVSNRTSMGSVMDFLRTNPGANVIQCCRNGCGETHGRFEEITIRETEVRLRELWKLQQQQESRELSSIDSGHNHSEEEEEEEVLYEDPENMFSCEAGNEINHISGSGSFSFMPSKYCDEPSEKTENQVQQELRWLKAKCQIELRDIQDEQLKTRWPESGEEVEISPKDGFLGSVSGLGREEDTVKEMFGERLVPKCLKRTTSLPVDAIDS

SEQ ID NO: 4508 - protein, 546 aa, Arabidopsis thaliana
MTMFASLTSKMLSVSTSDHASVVSLNLFVALLCACIVIGHLLEENRWMNESITALLIGLGTGVVILLISRGKNSHLLVFSEDLFFIYLLPPIIFNAGFQVKKKQFFRNFVTIMAFGAIGTVVSCTIISLGAIQFFKKLDIGTFDLGDFLAIGAIFAATDSVCTLQVLNQDETPLLYSLVFGEGVVNDATSVVLFNAIQSFDLTHLNHEAAFQFLGNFFYLFLLSTGLGVATGLISAYVIKKLYFGRHSTDREVALMMLMAYLSYMLAELFALSGILTVFFCGIVMSHYTWHNVTESSRITTKHAFATLSFLAETFIFLYVGMDALDIEKWRFVSDSPGTSVAVSSILMGLVMLGRAAFVFPLSFLSNLAKKHQSEKISIKQQVVIWWAGLMRGAVSMALAYNKFTRSGHTELRGNAIMITSTITVCLFSTMVFGMLTKPLIRYLMPHQKATTSTTSMLSDDSTPKSIHIPLLDGEQLDSFELPGSHQDVPRPNSLRGFLMRPTRTVHYYWRQFDDAFMRPVFGGRGFVPFVPGSPTERSSHDLSKP

SEQ ID NO: 4509 - protein, 458 aa, Arabidopsis thaliana
MEEGLLRHENDRDDRRITACVILSTFVAVCSSFSYGCANGYTSGAETAIMKELDLSMAQFSAFGSFLNLGGAVGALFSGQLAVILGRRRTLWACDLFCIFGWLSIAFAKNVLWLDLGRISLGIGVGLTSYVVPVYIAEITPKHVRGAFSASTLLLQNSGISLIYFFGTVINWRVLAVIGALPCFIPVIGIYFIPESPRWLAKIGSVKEVENSLHRLRGKDADVSDEAAEIQVMTKMLEEDSKSSFCDMFQKKYRRTLVVGIGLMLIQQLSGASGITYYSNAIFRKAGFSERLGSMIFGVFVIPKALVGLILVDRWGRRPLLLASAVGMSIGSLLIGVSFTLQEMNLFPEFIPVFVFINILVYFGFFAIGIGGLPWIIMSEIFPINIKVSAGSIVALTSWTTGWFVSYGFNFMFEWSAQGTFYIFAMVGGLSLLFIWMLVPETKGQSLEELQASLTGTT

SEQ ID NO: 4510 - protein, 1052 aa, Arabidopsis thaliana
MAPVRKSRSVNKRFTNETSPRKDAGKSKKNKLRKKKLSDKLGPQWTRLELERFYDAYRKHGQEWRRVAAAIRNSRSVDMVEALFNMNRAYLSLPEGTASVAGLIAMMTDHYSVMEGSGSEGEGHDASEVPRKQQKRKRAKPQRSDSPEEVDIQQSIGSPDGCLTFLKQARANGTQRHATGKRTPRVPVQTSFMRDDREGSTPPNKRARKQFDANDDVAHFLALALTDASRRGGSPKVSESPNRRTELSDSSPIKSWGKMSRTRKSQSKHCGSSIFEEWMESSRERKLDSDKDTTLLMDMERAGEMEAPRKGKRVYKKRVKVEEAECNDSDDNGEACSATQGLRSKSQRRKAAIEASREKYSPRSPKKRDDKHTSGAFDALQALAELSASMLPANLMESELSAQLKEERTEYDMDEKSSTPEATSTSSHGEKANVEPDDSLLHAISSVENANKRKSKPSRLVSTDCDDVPTGKLQPQTSGSLRKRKPKVLGDEAPAEFSQNKSINKKELPQDENNMKSLVKTKRAGQVPAQSKQMKTVKALEESAITSDKKRPGMDIVASPKQVSDSGPTSLSQKPPNRRKKSLQKSLQEKAKSSETTHKAARSSRSLSEQELLLKDKLATSLSFPFARRRCIFEWFYSAIDHPWFSKMEFVDYLNHVGLGHIPRLTRLEWSVIKSSLGRPRRFSERFLHEEREKLKQYRESVRKHYTELRTGAREGLPTDLARPLAVGNRVIAIHPKTREIHDGKILTVDHNKCNVLFDDLGVELVMDIDCMPLNPLEYMPEGLRRQIDKCLSMKKEAQLSGNTNLGVSVLFPPCGLENVSFSMNPPLNQGDMIAPILHGKVSSNTSSPRQTNHSYITTYNKAKEAEIQRAQALQHALDEKEMEPEMLEIVKGSKTRAQAMVDAAIKAASSVKEGEDVNTMIQEALELVGKNQLLRSSMVKHHEHVNGSIEHHHNPSPSNGSEPVANNDLNSQDGSEKNAQMPSELITSCVATWLMIQMCTERQYPPADVAQLIDAAVTSLQPRCPQNLPIYREIQTCMGRIKTQIMSLVPT

SEQ ID NO: 4511 - protein, 124 aa, Arabidopsis thaliana [sequence omitted]

SEQ ID NO: 4512 - protein, 318 aa, Arabidopsis thaliana
MMTSMEGMMEMGVLDDIIRRLLEGKGGKQVQLSEVEIRQLCVNARQIFLSQPNLLELHAPIRICGDIHGQYQDLLRLFEYGGYPPSANYLFLGDYVDRGKQSLETICLLLAYKIRYPSKIFLLRGNHEDAKINRIYGFYDECKRRFNVRLWKIFTDCFNCLPVAALIDEKILCMHGGLSPELENLGQIREIQRPTEIPDNGLLCDLLWSDPDQKNEGWTDSDRGISCTFGADVVADFLDKNDLDLICRGHQVVEDGYEFFAKRRLVTIFSAPNYGGEFDNAGALLSVDQSLVCSFEILKPAPASSTNPLKKVPKMGKS

SEQ ID NO: 4513 - protein, 295 aa, Arabidopsis thaliana
MAMQTVREGLFSAPQTSWWTAFGSQPLAPESLAGDSDSFAGVKVGSVGETGQRVDKQSNSATHLAFSLGDVKSPRLVPKPHGATFSMQSPCLELGFSQPPIYTKYPYGEQQYYGVVSAYGSQSRVMLPLNMETEDSTIYVNSKQYHGIIRRRQSRAKAAAVLDQKKLSSRCRKPYMHHSRHLHALRRPRGSGGRFLNTKSQNLENSGTNAKKGDGSMQIQSQPKPQQSNSQNSEVVHPENGTMNLSNGLNVSGSEVTSMNYFLSSPVHSLGGMVMPSKWIAAAAAMDNGCCNFKT

SEQ ID NO: 4514 - protein, 331 aa, Arabidopsis thaliana
MATRNRTLLFRKYRNSLRSVRAPMGSSSSSTLTEHNSLTGAKSGLGPVIEMASTSLLNPNRSYAPVSTEDPGNSSRGTITVGLPPDWVDVSEEISVYIQRARTKMAELGKAHAKALMPSFGDGKEDQHQIETLTQEVTFLLKKSEKQLQRLSAAGPSEDSNVRKNVQRSLATDLQNLSMELRKKQSTYLKRLRLQKEDGADLEMNLNGSRYKAEDDDFDDMVFSEHQMSKIKKSEEISIEREKEIQQVVESVSELAQIMKDLSALVIDQGTIVDRIDYNIQNVASTVDDGLKQLQKAERTQRQGGMVMCASVLVILCFIMLVLLILKEILL

SEQ ID NO: 4515 - protein, 801 aa, Arabidopsis thaliana
MVEMEAVERKRSRGGFLNMFDWPGKSRKKLFSSSSSSSKLSEGSKQEKQNAQNPSKSWPSLIEGDEIGKNSTYNPRSDSSCSTSTPTSDDGQGSKAPSVVARLMGLESIPVPNALEPRRNPDFDPYFLRSSRKASTWDAYENLGYVNLRSDYDGISWDHLDSRMNKECNRPIDRFQTETLPPRSAKPIPVTHNRLLSPIRSPGFVQSRNPASVMEEASRMIEPSPRVVAKTRFSSSDSSSSLPMKIRDLKEKLEASQKGQSPQISNGTCNNKCFRGKQDEKRTTLPLKTQERNNLLGESRFGGSKGKVKPPSVSAHAKANTIHKRDSSMLSNGYRDQKKKVETKNRIVKSGLKESSASTRKTVDKPNNQKQNQFAETSVSNQRGRKVMKKVNKVLVENGTTTKKPGFTATSAKKSTSSSLSRKKNLSRSKKPANGVQEAGVNSDKRIKKGEKVIKCNITVDGGLKTGDDDRKKDMDVISFTFSSPIKGLSSDSQYFLKKNDQDAESALCFNKIDSDSLNFLLEKKLRELTSKMESSCSSLTQEEESSGSITKDWVNGTRSLPSDDQDNGLSESESDSDYSSSFYKKKIFQAEDDEEVNSFSTAENLQISCSTSFSSSRNDYHHNIEETELSESVALSEAEEGHDWELEYITEIIASGQLMIKEFSLGMATDILPLSLFDETEGKRDARGKIERKTLFDLVNQWLTLKCEQMFMGTCKGVLGKQDIFLERREILADQVLKEAQGLKKMREMMMDELVDNDMSSCEGKWLDYMRETYEEGIEIEEEIVSELVDDLINDLIMCC

SEQ ID NO: 4516 - protein, 53 aa, Arabidopsis thaliana
MKRVVKKVVCMRLKSARRLKRVVWSRLKTAFFYRRRRFLRLLHPNKSSSYCFY

SEQ ID NO: 4517 - protein, 348 aa, Arabidopsis thaliana
MGCVQCKCCSRYPSSSSDGDSRGPLEANGVLKGKDQKPLGSIHVPSPNFDMVYSVLSQRGYYPDSPDKENQDTYCIKTELQGNPNVHFFGVFDGHGVLGTQCSNFVKERVVEMLSEDPTLLEDPEKAYKSAFLRVNEELHDSEIDDSMSGTTAITVLVVGDKIYVANVGDSRAVLAVKDRNRILAEDLSYDQTPFRKDECERVKACGARVLSVDQVEGLKDPNIQTWANEESEGGDPPRLWVQNGMYPGTAFTRSVGDFTAESIGVIAEPEVSMVHLSPNHLFFVVASDGIFEFLPSQAVVDMVGRYADPRDGCAAAAAESYKLWLEHENRTDDITIIIVQIKKLSNE

SEQ ID NO: 4518 - protein, 125 aa, Arabidopsis thaliana
MASSILLTLITFIFLSSLSLSSPTTNTIPSSQTISPSEEKISPEIAPLLPSPAVSSTQTIPSSSTLPEPENDDVSADPDPAFAPSASPPASSLASLSSQAPGVFIYFVFAAVYCFSLRLLAVSAI

SEQ ID NO: 4519 - protein, 773 aa, Arabidopsis thaliana
MENPPAEELLKKILELEESQEHLKQEMSRLKVSTELRQRSHSVSPHRPARRNIGEGAPSWRKSGAASFRNASPLRKESRIQNSMRLRSEVGGGGPSAGKFTDKQYLNILQSMAQAVHAFDLNMRIIFWNAMAEKVYGYSAAEALGENPINVIADDRDAAFAMNIARRCVRGESWTGEFPVKSKSGDRFSAVTTCSPFYDDDGALMGIICITSNTAPYLNPRISLAKLKAQEEGETSSIPARNSFASKLGLDSRGAVISKLGLDSDQPIQVAIASKISDLASKVSNKVRSKMRAGDNSATLSEGGSGDSHQKDHNVFGATLVDHRDDAASSGASTPRGDFIQSPFGVFTCNDEKFVSKPFKDSSDESDGKPAIHKVLTSKAEEWMVKKGLSWPWKGNEQEGSKGRPTNSVWPWVQNEQKKERCHQINPSAGVQYESHAFESNKPINNEASSLWSSPINANSTSSASSCGSTSSSVMNKVDTDSEGLEYEILWDDLTIGEQVGQGSCGTVYHGLWFGSDVAVKVFSKQEYSAEVIESFKQEVLLMKRLRHPNVLLFMGAVTSPQRLCIVSEFLPRGSLFRLLQKSTSKLDWRRRIHMALDIARGMNYLHHCSPPIIHRDLKSSNLLVDKNWTVKVADFGLSRIKHETYLTSKSGKGTPQWMAPEVLRNESADEKSDIYSFGVVLWELATEKIPWETLNSMQVIGAVGFMDQRLEIPKDIDPRWISLMESCWHSDTKLRPTFQELMDKLRDLQRKYMIQFQATRAALSDNSLLKDN

SEQ ID NO: 4520 - protein, 1038 aa, Arabidopsis thaliana
MGTENQGYPNFPARPASSPFASAPPPGIPPQSGGPPTGSEAVGFRPFTPSASQPTRPFTASGPPPAPPVGTMRPGQPSPFVSQIPGSRPPPPSSNSFPSPAYGPPGGAPFQRFPSPPFPTTQNPPQGPPPPQTLAGHLSPPMSLRPQQPMAPVAMGPPPQSTTSGLPGANAYPPATDYHMPARPGFQQSMPPVTPSYPGVGGSQPSFPGYPSKQVLQAPTPFQTSQGPPGPPPVSSYPPHTGGFAQRPNMAAQQNLHPNYAPPPSNVQGLTEDFNSLSLSSIPGSLEPGLDHKSFPRPLDGDVEPNSFAEMYPMNCHSRYLRLTTSAIPNSQSLASRWHLPLGAVVCPLAETPEGEEVPLIDFGSTGIIRCRRCRTYVNPFVTFTDSGRKWRCNICSMLNDVPGEYFSHLDATGRRMDMDQRPELTKGSVEIIAPTEYMVRPPMPPIYFFLIDVSISATKSGMLEVVAQTIKSCLDNLPGYPRTQIGFITYDSTLHFYNMKSSLSQPQMMVVSDLDDIFVPLPDDLLVNLSESRTVVDAFLDSLPLMFQDNFNVESAFGPALRAAFMVMNQLGGKLLIFQNSLPSLGAGRLKLRGDDPRVYGTDKEYALRVAEDPFYKQMAADCTKFQIGINVYAFSDKYTDIASLGTLAKYTGGQVYYYPGFQSSVHGDKLRHELARDLTRETAWEAVMRIRCGKGIRFSSYHGNFMLRSTDLLALPAVDCDKAYAMQLSLEETLLTSQTVYFQVALLYTASCGERRIRVHTSVAPVVTDLGEMYRQADTGSIVSLYARLAIEKSLSAKLDDARNAIQQKIVKALKEYRNLHAVQHRLGSRLVYPESLKFLPLYGLAITKSTPLLGGPADTSLDERCAAGFTMMALPVKKLLKLLYPNLFRVDEWLLKPSAAHDDFKDVLRRLPLAAESLDSRGLYIYDDGFRLVLWFGRMLSPDIAKNLLGVDFAADLSRVTFQEQENGMSKKLMRLVKKLRESDPSYHPMCFLVRQGEQPREGFLLLRNLIEDQMGGSSGYVDWILQLHRQVQQN

SEQ ID NO: 4521 - protein, 203 aa, Arabidopsis thaliana
MYADKLEAESGSRKVVKDRINGGSGDISTRVRQVTGKRQRQDDKWEHDLFSSDKPQLSNRRVDPRDLRLKLQKRHHGSQSGREAGSGVRDLRDQLSGTMNQQPKNSDPPKSKAEAARPSMKSVATETETRKTSSQATRKKSQQADSSVDSFLESLGLEKYSTAFQVEEVDMDALMHMTDDDLKAMLIPMGPRKKILLALGSKP

SEQ ID NO: 4522 - protein, 547 aa, Arabidopsis thaliana
MGVILDSWCFCKGVGKSEKMKGSIFTGKAPAMARISVSGPNGVTSGTGFLIHRNLLLTTHLNLPSISATETAEVRLQNGVAAALFPHRFFITSSVIDLTIVGLDLVDGDSSSQSQLQQQPHYLKTCSKPNLDLGSVVYLLGYANQNELKIGEGKLVVATDNLIKLSTDEMIWSPGSAGFDVQGNLAFMICDPRKLSTSPTSTSSSSSSSLKKDNNKTLMMQFGIPIPVICDWLNQHWEGSLDEHTTKPKLPLIRLMSSGQKSERSCTSFTMRRVFKPNDSADVGTPSSSNTRDQTHPSSSIAAEEEKEEETSKTNPQVCGTTTHAQGIPTPEIYESPKLTSGPLRNETAQVHLLDINFPPRIPKAITFHPELNSLQSNHIVEEAEIVSEGSDAQIASTGSVNGALSEVISSSPPAAAHYVYNNHGYSSEEETMYSAETAESRNYPTPPRKSEFHHERVGRSQSCVSSSRWGTPQKSLNGRREMLEKQRSFVHGKKMHSQGAMSQRSNDYYSPTVSSIMKKRINSSEQQIIKPVPRPRAVSSSPRWAF

SEQ ID NO: 4523 - protein, 395 aa, Arabidopsis thaliana
MEDVSESDNNVETSIIHLPDDCLSFIFQRLDSVADHDSFGLTCHRWLNIQNISRRSLQFQCSFSVLNPSSLSQTNPDVSSHHLHRLLTRFQWLEHLSLSGCTVLNDSSLDSLRYPGARLHTLYLDCCFGISDDGISTIASFCPNLSVVSLYRCNISDIGLETLARASLSLKCVNLSYCPLVSDFGIKALSQACLQLESVKISNCKSITGVGFSGCSPTLGYVDADSCQLEPKGITGIISGGGIEFLNISGVSCYIRKDGLVPIGSGIASKLRILNLRMCRTVGDESIEAIAKGCPLLQEWNLALCHEVKISGWEAVGKWCRNLKKLHVNRCRNLCDQGLLALRCGCMNLQILYMNGNARLTPTAIEMFRLHRADITLRTEEMMVIGPDWRLYAQE

SEQ ID NO: 4524 - protein, 581 aa, Arabidopsis thaliana
MSKQTYKVCFCFRRRFRYTASEAPREIKTIFEKYSENGVMTVDHLHRFLIDVQKQDKATREDAQSIINSASSLLHRNGLHLDAFFKYLFGDNNPPLALHKVHHDMDAPISHYFIFTGHNSYLTGNQLSSDCSEVPIIDALKKGVRVIELDIWPNSNKDDIDVLHGMTLTTPVGLIKCLKAIRAHAFDVSDYPVVVTLEDHLTPDLQSKVAEMVTEIFGEILFTPPVGESLKEFPSPNSLKRRIIISTKPPKEYKEGKDVEVVQKGKDLGDEEVWGREVPSFIQRNKSEAKDDLDGNDDDDDDDDEDKSKINAPPQYKHLIAIHAGKPKGGITECLKVDPDKVRRLSLSEEQLEKAAEKYAKQIVRFTQHNLLRIYPKGTRVTSSNYNPLVGWSHGAQMVAFNMQGYGRSLWLMQGMFRANGGCGYIKKPDLLLKSGSDSDIFDPKATLPVKTTLRVTVYMGEGWYFDFRHTHFDQYSPPDFYTRVGIAGVPGDTVMKKTKTLEDNWIPAWDEVFEFPLTVPELALLRLEVHEYDMSEKDDFGGQTCLPVWELSEGIRAFPLHSRKGEKYKSVKLLVKVEFV

SEQ ID NO: 4525 - protein, 640 aa, Arabidopsis thaliana
MMKIIAAFLFLLVTTFVSRCLSADIESDKQALLEFASLVPHSRKLNWNSTIPICASWTGITCSKNNARVTALRLPGSGLYGPLPEKTFEKLDALRIISLRSNHLQGNIPSVILSLPFIRSLYFHENNFSGTIPPVLSHRLVNLDLSANSLSGNIPTSLQNLTQLTDLSLQNNSLSGPIPNLPPRLKYLNLSFNNLNGSVPSSVKSFPASSFQGNSLLCGAPLTPCPENTTAPSPSPTTPTEGPGTTNIGRGTAKKVLSTGAIVGIAVGGSVLLFIILAIITLCCAKKRDGGQDSTAVPKAKPGRSDNKAEEFGSGVQEAEKNKLVFFEGSSYNFDLEDLLRASAEVLGKGSYGTTYKAILEEGTTVVVKRLKEVAAGKREFEQQMEAVGRISPHVNVAPLRAYYFSKDEKLLVYDYYQGGNFSMLLHGNNEGGRAALDWETRLRICLEAARGISHIHSASGAKLLHGNIKSPNVLLTQELHVCVSDFGIAPLMSHHTLIPSRSLGYRAPEAIETRKHTQKSDVYSFGVLLLEMLTGKAAGKTTGHEEVVDLPKWVQSVVREEWTGEVFDVELIKQQHNVEEEMVQMLQIAMACVSKHPDSRPSMEEVVNMMEEIRPSGSGPGSGNRASSPEMIRSSDSPV

SEQ ID NO: 4526 - protein, 465 aa, Arabidopsis thaliana
MVSSQRPVPNKIQKQQYLSISPSNSVLKDDVELEFSDVFGPLPEEANDIAYDEPAVVYSRSHSLVGPCSLDSHSLKLTKLTLLETEDSIDLVECLEGESLKENDDFSGNDDSDNEKALEGDLVKVSGVVGIDDFEVMKVVGKGAFGKVYQVRKKETSEIYAMKVMRKDHIMEKNHAEYMKAERDILTKIDHPFIVQLKYSFQTKYRLYLVLDFINGGHLFFQLYHQGLFREDLARVYTAEIVSAVSHLHEKGIMHRDLKPENILMDTDGHVMLTDFGLAKEFEENTRSNSMCGTTEYMAPEIVRGKGHDKAADWWSVGILLYEMLTGKPPFLGSKGKIQQKIVKDKIKLPQFLSNEAHAILKGLLQKEPERRLGSGLSGAEEIKQHKWFKGINWKKLEAREVMPSFKPEVSGRQCIANFDKCWTDMSVLDSPASSPSSDPKANPFTNFTYVRPPPSFLHQSTTTL

SEQ ID NO: 4527 - protein, 154 aa, Arabidopsis thaliana
MGIQNILWQVAKKSFTGSIIGLTISDRCCSVVPVRGDSMSPTFNPQRNSYLDDYVLVDKFCLKDYKFARGDVVVFSSPTHFGDRYIKRIVGMPGEWISSSRDVIRVPEGHCWVEGDNKTSSLDSRSFGPIPLGLIQGRVTRVMWPPQRISKIGR

SEQ ID NO: 4528 - protein, 329 aa, Arabidopsis thaliana
MALSMEFGFSIGSCFKAPNPPVLISASPNKINFTLRRRKKRFLLRVSAVSYKEFAESALEETRKRIVLEPSHLQEKYSSMTGLDGKTELQMLAFKSSKIRLLRSMAIENETMQVFDFAGFMEPEYDTPIFCANFFTSTNVNIVVLDLNPLHQLTDQTDYQDKYYNKIMSIYHKYAETFPWGGKLTGESIKFFSPLVMWTRFSSSKEKHKALFSAFLEYYQAWLEMTIQVREEMEPSHVRANCEAQHKYLTWRAQKDPGHGLLKRLVGEAKAKELLRDFLFNGVDELGTKTFIDYFPEYQTEDGTVSDKRSIIGKSYETRPWDLTGQFIG

SEQ ID NO: 4529 - protein, 363 aa, Arabidopsis thaliana
MAKDGPNWDGLLKWSLSHADGTRPTRQLSEEDRKWFMEAMQSQTVDVVKRMKEITLVMQTPEQVLVEHGVTPEDIQDLLDELQEHVESIDMANDLHSIGGLVPLLSFLKNSHANIRAKAADVVSTIVQNNPRSQELVMETNALESLLSNFTSDTDIHARTQALGAISSLIRHNKPGVTAFKLANGYAGLRDALASDSVRFQRKALNLLQYLLQEDDSDRSIATGLGFPRVMMHLASSDDAEIREAALRGLLELSREKNDGSSSIDKSDEKLRQLLEERIKGITLMSQEDLETVKEERQLVDLLWSICYNEPSSLREKGLVVLPGEDALPPDVASKLFEPPLRASAANRNATEKKDEPMKLLGP

SEQ ID NO: 4530 - protein, 904 aa, Arabidopsis thaliana
MSLVGRVGSLISQGVYSVATPFHPFGGAIDVIVVQQQDGSFRSTPWYVRFGKFQGVLKGAEKFVRISVNGTEADFHMYLDNSGEAYFIREVDPAANDTNNLISGSENNNGNQNNGVTYRLEHSLSDSGTGELREGFDPLSRLERTESDCNRRFYDFQDDPPSPTSEYGSARFDNLNVESYGDSQGSDSEVVLVSIDGHILTAPVSVAEQEAENLRLNTPQFHLAPGDGTEFCEGNTEFASSETPWDTEYIDKVEESSDTANIASDKVDAINDERNDLDSHSRDNAEKDSHDAERDLLGSCLEQSELTKTSENVKSEEPGPTFEDRNLKEGEFPLRTIMENDRSEDEVTIESIDTLVDSFESSTTQITIEEVKTTEGSRISVDSNADSECKDEQTSAETAILFNNQESSISVDSNADSECKDEQPRISAETAILINNQEGGIIESEDQDSERVSIDSTREEVDKDNEDRKTVVSVGVTSSVDEGEPDTDQRYELSLCKDELRQGMGLSAAAEVFDAHMISKEEYINSATSILESENLVVRIRETYMPWTKAARIVLGKAVFDLDLDIQPDDVISVEENESPKPKDDETTITPSSSGTRWRLWPIPFRRVKTVEHTGSNSSSEEDLFVDSEPGLQNSPETQSTTESRHESPRRQLVRTNVPTNEQIASLNLKDGQNMITFSFSTRVLGTQQVDAHIYRWRWDTKIVISDVDGTITKSDVLGQFMPFIGKDWTQSGVAKLFSAIKENGYQLLFLSARAIVQAYLTRNFLNNLKQDGKALPTGPVVISPDGLFPALYREVIRRAPHEFKIACLEDIRKLFPTDYNPFYAGFGNRDTDELSYRKLGIPKGKIFIINPKGEVATGHRIDVKKSYTSLHTLVNDMFPPTSLVEQEDYNPWNFWKLPIEEVE

SEQ ID NO: 4531 - protein, 344 aa, Arabidopsis thaliana
MASSDFDGILLGMGNPLLDVSAVVDQQFLDKYDIKLNNAILAEDKHLPMYDEMSQKFNVEYIAGGATQNSIKVAQWMLQVPGATSYMGSIGKDKYGEAMKKDATAAGVYVHYYEDEATPTGTCGVCVLGGERSLIANLSAANCYKVEHLKKPENWALVEKAKFYYIAGFFLTVSPESIQLVREHAAANNKVFTMNLSAPFICEFFKDVQEKCLPYMDYIFGNETEARTFSRVHGWETDDVEQIAIKMSQLPKASGTYKRTTVITQGADPVVVAEDGKVKKYPVIPLPKEKLVDTNGAGDAFVGGFLSQLVHGKGIEECVRAGCYASNVVIQRSGCTYPEKPDFN

SEQ ID NO: 4532 - protein, 815 aa, Arabidopsis thaliana
MSGLDVRGAVSFAERTKSVDALTKKEILSALNSGEVSETSEDARFRVRELVLPDGESYSGSLLGNVPEGPGKYIWSDGCVYDGEWRRGMRHGIGNMRWASGASYDGEFSGGYMHGSGTYVDANKLTYKGRWRLNLKHGLGYQVYPNGDVFEGSWIQGLGEGPGKYTWANKNVYLGDMKGGKMSGKGTLTWVTGDSYEGSWLNGMMHGVGVYTWSDGGCYVGTWTRGLKDGKGSFYSAGTRVPVVQEFYLNALRKRGVLPDMRRQNQVASSVNMENLRVGVNRNKLSKGSLINLEQSRNGRVSLERRWSLEVSIEKVIGHGYSDLSTAVLDSGSSVQYKANIPILEREYMQGVLISELVVNNGFSRTSRRAKRKHKRLVKEAKKPGEVVIKGHRSYDLMLSLQLGIRYTVGKITPIQRRQVRTADFGPRASFWMTFPRAGSTMTPPHHSEDFKWKDYCPMVFRNLREMFKIDAADYMMSICGNDTLRELSSPGKSGSVFFLSQDDRFMIKTLRKSEVKVLLRMLPDYHHHVKTYENTLITKFFGLHRIKPSSGQKFRFVVMGNMFFTDLRIHRRFDLKGSSLGRSADKVEIDENTILKDLDLNYSFFLETSWREGLLRQLEIDSKFLEAQNIMDYSLLLGVHHRAPQHLRSQLVRSQSITTDALESVAEDDTIEDDMLSYHEGLVLVPRGSENTVTGPHIRGSRLRASAVGDEEVDLLLPGTARLQIQQGVNMPARAELIPGREDKEKQILHDCCDVVLYLGIIDILQEYNMTKKIEHAYKSLHFDSLSISAVDPTFYSQRFLEFIKKVFPQNNKS

SEQ ID NO: 4533 - protein, 235 aa, Arabidopsis thaliana
MRRVFGAKKNTEPPPSIQDASDRINKRGDSVEDKIKKLDVELCKYKEQLKKTRPGPAQEAVKARAMRVLKQKKMYEGQRDMLYNQTFNLDQVSFAAEGLKDAQQTMTALKSANKELKGMMKTVKIQDIDNLQDEMMDLMDVSSEIQESLGRSYNIPDGLDEDDLMGELDALEADMGNETEADGMPSYLQPDTETDYDSELNLPAAPTGHNGAPHGRAQAEDEFGLPAVPRASLRG

SEQ ID NO: 4534 - protein, 181 aa, Arabidopsis thaliana
MGRLLLEPQANAPANANPKPKGGINDTYFDTNMVIILAALLCALICALSLNSALRCVLRITRRFTSDDQVSNASNANANLGRLAAATGLKKQALKQIPVGLYGSGIIDMKATECLICLGDFEDGEKVRVLPKCNHGFHVRCIDTWLLSRSSCPTCRQSLLLEQPSPMAVSRRDEDMVVSIV

SEQ ID NO: 4535 - protein, 249 aa, Arabidopsis thaliana
MDSLSDIDGDFDGRNEGGSSSDYRLLGRQITVHQFMGGGKGEFFFPEFHFGYSRKWKTWQFIAADLLLWRRRHLSLGVIIISTVAWLIFEFSGLPFLSVSSDVLLIVIMISFVHARVSAFRNRQLHSLPELVLSEEMVNSAAASFRIKLNHLLVMAHDVTVGNDFRLFFKQVVICLWLLSAIGSYISLCTLLYIGTILSVTIPALYSKYQSKVDKCCGTIHRRLSHHYKIVDENVISRLSWSLSKDKDS

SEQ ID NO: 4536 - protein, 101 aa, Arabidopsis thaliana
MLFRKGVVRGLDPARKLTTSRLSTILSRVFCPNSYFFLFLFFRDSLIFRFQIEIIVNVTCITEIYSRSLGKMRILFGNVSRNDQDLDYHLVSFHQYFFDKR

SEQ ID NO: 4537 - protein, 246 aa, Arabidopsis thaliana
MAAAAVSSNPRTVEEIFKDYSARRAALLRALTKDVDDFYSQCDPEKENLCLYGHPNESWEVNLPAEEVPPELPEPALGINFARDGMQRKDWLSLVAVHSDCWLLSVSFYFGARLNRNERKRLFSLINDLPTLFDVVTGRKAMKDNKPSSDSGSKSRNGTKRSIDGQTKSSTPKLMEESYEEEEEEDEHGDTLCGSCGGHYTNEEFWICCDVCERWYHGKCVKITPAKAESIKQYKCPPCCAKKGRQ

SEQ ID NO: 4538 - protein, 308 aa, Arabidopsis thaliana
MKIAANGRFFTIGLVASWYSSNIGVLLLNKYLLSNYGFKYPIFLTMCHMTACSLLSYVAIAWMKMVPMQTIRSRVQFLKIAALSLVFCVSVVFGNISLRFLPVSFNQAIGATTPFFTAVFAYLITFKREAWLTYFTLVPVVTGVVIASGSEPSFHLFGFIMCIAATAARALKSVLQGILLSSEGEKLNSMNLLLYMAPIAVVFLLPATLIMEKNVVGITIALARDDFRIVWYLLFNSALAYFVNLTNFLVTKHTSALTLQVLGNAKGAVAVVVSILIFRNPVSVTGMLGYSLTVCGVILYSEAKKRSK

SEQ ID NO: 4539 - protein, 113 aa, Arabidopsis thaliana
MFSSSILLQILACAIYGNWWPMLSALMYVVVPMPCMFFGGGSTQFLISRDGGGWIDAAKFLTGASTVGSLAIPIILRHAQMIETGAMLIEFTSFFIFICTVMCFHRASLDDDW

SEQ ID NO: 4540 - protein, 504 aa, Arabidopsis thaliana
MESPIKCCDCGCDCCSSSPGSWIRSVKKRRHDELQTEKRFSIPELDDLDMFSNPRVQIENECELLRETVSNQQQTIQDLYHELEQERIASSTAADETVKMIQTLEREKAKIDLELKQLQRSVDETLNYENQEIEALENMVYQRDQTIQALTFETQAYKHRMMSFGLTEAEADGERSLLSRNPSMIDFSSEYDCPTQDYPPLKCNINENQDPLEADIYVADDENYPPADSPHGRVHLKTLDRRLSQMETNPSFTQLNRGRDVSEKGMVGESPRRQRHFRRISPTGSSSSHLGASKELRPDVFVDSPRSQSYSSKKMEDVSYTENNNAKDDLSEIGDDMSDRVYTIDSVHHSSVAHSGGVAEQKIEDGASDGNVVFPREHTDLGDPDITKLYMRLQALEADRESMKHALLSMRTEKAQMVLLKEIAQHLSKEVVPQRRLPLRKASIAGPLTFTPVFKWITSFVSWKRKARRSKYMYGMSGNNIGLQMLLEKVPRSRKWRCLRSTQV

SEQ ID NO: 4541 - protein, 581 aa, Arabidopsis thaliana
MQMEANDCQEEHKFTLDNYHVVEQVRRGKSSSDFVVLHDIEDKKYAMKKICLAKHTDKLKQTALQEISRAVINYDLMKLLSSLKNPYIVHYEDSWIDNDNNACIFTAYYEGGNMANAIKKARGKLFPEERIFKWLAQLLLAVNYLHSNRVVHMDLTCSNIFLPKDDHVQLGNYGLAKLINPEKPVSMVSGISNSMCPEVLEDQPYGYKSDIWSLGCCMYEITAHQPAFKAPDMAGLINKINRSLMSPLPIVYSSTLKQMIKLMLRKKPEYRPTACELLRNPSLQPYLLQCQNLSPIYLPVFPIKPVNSPKDKARRNSLPGKFGKERVSREKSEVSRSLENLYPFWTNTETGSSSSSQPASSTNGAEDKLETKRIDPSCDTLKISEFTSQKSDESLIDPDIAVYSTETPAEENALPKETENIFSEESQLRDVDVGVVSAQEVACSPPRAIEEAETQEALPKPKEQITVPISSVAHSSTEVAAAKDHLSGSLEGDKAKMVKLTASEMSSVLSKLTKLGPPQSKERADALECLLEKCAGLVKQEKYEELAGLLTPFGEDGVSARDTAIWFAKTLLSSDKLNQGT

SEQ ID NO: 4542 - protein, 1013 aa, Arabidopsis thaliana
MEEVQPPVTPPIEPNGKRSEASLLDICEKVLSLDGSTCDEALKLFTETKRILSASMSNIGSGTREEVERFWFAFILYSVKRLSVRKEADGLSVSGDNEFNLCQILRALKLNIVDFFKELPQFVVKAGSVLGELYGADWENRLQAKEVQANFVHLSLLSKYYKRGFREFFLTYDANAEKNSANSSTYLLDSYRFGWLLFLALRNHAFSRFKDLVTCSNGVVSILAILIIHVPCRFRNFSIQDSSRFVKKGDKGVDLVASLCKIYDASEDELRIVIDKANNLVETILKKKPSPASECQTDKLDNIDPDGLTYFEDLLEETSISTSLITLEKDYYDGKGELDERVFINEEDSLLGSGSLSAGAVNITGVKRKIDALSSPARTFISPLSPHKSPAAKTNGISGATKLAATPVSTAMTTAKWLRTVISPLLPKPSPGLEHFLKSCDRDITNDVTRRAHIILEAIFPNSSLGAQCGGGSLQAVDLMDDIWAEQRRLEACKLYYRVLEAMCKAEAQILHANNLNSLLTNERFHRCMLACSAELVLATHKTITMLFPAVLERTGITAFDLSKVIESFIRHEDSLPRELRRHLNSLEERLLESMVWEKGSSMYNSLIVARPSLALEINQLGLLAEPMPSLDAIAALINFSDGANHASSVQKHETCPGQNGGIRSPKRLCTDYRSILVERNSFTSPVKDRLLALGNVKSKMLPPPLQSAFASPTRPNPGGGGETCAETGINIFFTKINKLAAVRINGMVERLQLSQQIRESVYCFFQHVLAQRTSLLFSRHIDQIILCCFYGVAKISQMSLTFREIIYNYRKQPQCKPLVFRSVYVDALQCRRQGRIGPDHVDIITFYNEIFIPAVKPLLVELGPVRNDRAVEANNKPEGQCPGSPKVSVFPSVPDMSPKKVSAVHNVYVSPLRGSKMDALISHSTKSYYACVGESTHAYQSPSKDLSAINNRLNNSSSNRKRTLNFDAEAGMVSDSMVANSLNLQNQNQNQNGSDASSSGGAAPLKTEPTDS

SEQ ID NO: 4543 - protein, 638 aa, Arabidopsis thaliana
MNNKLSDFEKNLYKKLKSGKLEVKVSYRTFLCPYCPDNKKKVGLYVDILQHASGVGNSQSKKRSLTEKASHRALAKYLIKDLAHYATSTISKRLKARTSFIPAETGDAPIIYDDAQFEKLVWPWKGVLVNIPTTSTEDGRSCTGESGPKLKDELIRRGFNPIRVRTVWDRFGHSGTGIVEFNRDWNGLQDALVFKKAYEGDGHGKKDWLCGATDSSLYAWLANADDYYRANILGENLRKMGDLKSIYRFAEEEARKDQKLLQRLNFMVENKQYRLKKLQIKYSQDSVKLKYETEEKEKILRAYSEDLTGRQQKSTDHFNRIFADHEKQKVQLESQIKELEIRKLELAKREAENETQRKIVAKELEQNAAINSYVQLSALEQQKTREKAQRLAVDHKMQKEKLHKRIAALERQLDQKQELELEVQQLKSQLSVMRLVELDSGSEIVNKVETFLRDLSETEGELAHLNQFNQDLVVQERKSNDELQEARRALISNLRDMGLHIGVKRMGELDTKPFMKAMRIKYCQEDLEDWAVEVIQLWEEYLKDPDWHPFKRIKLETAETIVEVIDEDDEKLRTLKNELGDDAYQAVANALLEINEYNPSGRYISSELWNFREDRKATLEEGVNSLLEQWNQAKHLKS

SEQ ID NO: 4544 - protein, 489 aa, Arabidopsis thaliana
MGETLITTLSMENYHPSTLLSMDSGAFTHEESERDMNGSLILTGPPDINLPLSSEARPSLLLWNEHCDILDVGLGPQLYEPEAVVHVPKVAKKYNKRVDSAWGAWLFFSFYFKPVLDEKSKSKLTRDSNGLSGYDKSDLQLDSFLVQHDMENMYMWVFKEKPENALGKMQLRSYMNGHSREGERPFPFSVDKGFVRSHRMQRKHYRGLSNPQCLHGIEVVYSPNLSVLSEDEKKKWTELTGRDVNFAIPAEASDYGSWRNLPNTEFEAERPLPLAKANGHTHLKKLNGTCLNLSTHSPDHAVDTVEVQLAGSNKRKRDCLALGNCDDSSSSEKSLDMKIHATELPWSNDFSGVMKNVYGPVTAAKTIYEDDRGFLIVMSLPFVDSGRVKVTWRNTPAHGIVKISCVSTACEPFIKRHDRTFKLTDPTPEHCPPGEFVREVSLPNRIPDDAKLEAYRDETGTTLEVLVPKHRMGPEEHEVRVCLRPFVLE

SEQ ID NO: 4545 - protein, 385 aa, Arabidopsis thaliana
MVSSATILRMVAPCWRRPSVKGDHSTRDANGRCDGLLWYKDSGNHVAGEFSMSVIQANNLLEDHSKLESGPVSMFDSGPQATFVGVYDGHGGPEAARFVNKHLFDNIRKFTSENHGMSANVITKAFLATEEDFLSLVRRQWQIKPQIASVGACCLVGIICSGLLYIANAGDSRVVLGRLEKAFKIVKAVQLSSEHNASLESVREELRSLHPNDPQIVVLKHKVWRVKGIIQVSRSIGDAYLKKAEFNREPLLAKFRVPEVFHKPILRAEPAITVHKIHPEDQFLIFASDGLWEHLSNQEAVDIVNTCPRNGIARKLIKTALREAAKKREMRYSDLKKIDRGVRRHFHDDITVIVVFLDSHLVSRSTSRRPLLSISGGGDLAGPST

SEQ ID NO: 4546 - protein, 694 aa, Arabidopsis thaliana
MSEASCLASPLLYTNSGIHSDSFYASLIDSATHKAQLKQIHARLLVLGLQFSGFLITKLIHASSSFGDITFARQVFDDLPRPQIFPWNAIIRGYSRNNHFQDALLMYSNMQLARVSPDSFTFPHLLKACSGLSHLQMGRFVHAQVFRLGFDADVFVQNGLIALYAKCRRLGSARTVFEGLPLPERTIVSWTAIVSAYAQNGEPMEALEIFSQMRKMDVKPDWVALVSVLNAFTCLQDLKQGRSIHASVVKMGLEIEPDLLISLNTMYAKCGQVATAKILFDKMKSPNLILWNAMISGYAKNGYAREAIDMFHEMINKDVRPDTISITSAISACAQVGSLEQARSMYEYVGRSDYRDDVFISSALIDMFAKCGSVEGARLVFDRTLDRDVVVWSAMIVGYGLHGRAREAISLYRAMERGGVHPNDVTFLGLLMACNHSGMVREGWWFFNRMADHKINPQQQHYACVIDLLGRAGHLDQAYEVIKCMPVQPGVTVWGALLSACKKHRHVELGEYAAQQLFSIDPSNTGHYVQLSNLYAAARLWDRVAEVRVRMKEKGLNKDVGCSWVEVRGRLEAFRVGDKSHPRYEEIERQVEWIESRLKEGGFVANKDASLHDLNDEEAEETLCSHSERIAIAYGLISTPQGTPLRITKNLRACVNCHAATKLISKLVDREIVVRDTNRFHHFKDGVCSCGDYW

SEQ ID NO: 4547 - protein, 582 aa, Arabidopsis thaliana
MYDSQVLKSKYNPFLRRSHSGKKFQGTVTMSEGRETCEESTSGESFPYRFQLEEDVKRLQLQLQQEIDLHTFLESVMEKDPWELSYSSSVPHPAQELLSNIVTLETAVTKLEQEMMSLNFQLSQERNERRLAEYQLTHSASPLNSSSSLRYLNQSDSELHQSAEDSPSQDQIVHYQESSSESSPAESTVEQTLDPSNDFLEKRLMRKTNARKLPRGMPPKYLWDQPNLLSEEMVRCMKNIFMSLADPTATSKASSNESHLSPVSPRGHLSSSASWWPSTERSMISSWVQSPQIDIQNNANVLATGDVFDPYRVRGKLSWAEIGNYSLASEVSWMSVGKKQLEYASGALKKFRTLVEQLARVNPIHLSCNEKLAFWINLYNALIMHAYLAYGVPKSDLKLFSLMQKAAYTVGGHSYTAATMEYVILKMKPPMHRPQIALLLAIHKMKVSEEQRRASIDTHEPLLGFALSCGMYSSPAVRIYSAKGVKEEMLEAQRDFIQASVGLSSKGKLLLPKMLHCYAKSLVEDSNLGVWISRYLPPHQAAFVEQCISQRRQSLLASRNCGILPFDSRFRYLFLPDDNTSL

SEQ ID NO: 4548 - protein, 544 aa, Arabidopsis thaliana
MVMEERSCHTANRVGDVQMGNGHKRGRSEDSSSNNVSIGVETDKQDMLSNKAQKKWVFGKCVNLSAVDAPCFKEMMTVDGGQMGLESSDCHDLNGWRLQDALEEVQDRVEKIKESWAITGCSILLDAWVDQKGRDLVTFVADCPAGLVYLISFDVSDFKDDVTALLSLVNGLVEEVGVRNVTQIIACSTSGWVGELGELFAGHDREVFWSVSVSHCFELMLVKISKIRSFGDIFDKVNNIWLFINNNPSVLNIFRDQCHGIDITVSSSEFEFVTPYLILESIFKAKKNLTAMFASSNWNNEQCIAISNLVSDSSFWETVESVLKCTSPLIHGLLLFSTANNQHLGYVYDTMDSIKESIAREFNHKPQFYKPLWDVIDDVWNKHLHNPLHAAGYFLNPTAFYSTNFHLDIEVVTGLISSLIHMVEDCHVQFKISTQIDMYRLGKDCFNEASQADQITGISPAEWWAHKASQYPELQSLAIKILSQTCEGASKYKLKRSLAEKLLLSEGMSNRERQHLDELVFVQYNLHLQSYKAKLSEEIDVYKD

SEQ ID NO: 4549 - protein, 316 aa, Arabidopsis thaliana
MATFHTVRDAVKLFDAGISGGKHLNKGQEEGVLVEETNLCLWNKEVNKLKEKIKNAVKTKIEALLELEEAKKTVEQLSQELGIKRNMINDEKDLDLSSSVRVVTSELGVAKESIHRVAEEESELCMLMESLKLELQNVEKAHSELKEIEQRERDHQAIEDLKKETKDAKTQLSLLEEELKIAVFEAQEAKDAEEHARERLNVAVLESDFRSLAVVKESAAEELTETEALRACRDETLKTLEMSEREIEDIKAATQDALKKAEMAQEATIVVDVELKRRRKAASRILAESKMCAKSTKEVLKSKPRSSSKEGCLVKC

SEQ ID NO: 4550 - protein, 315 aa, Arabidopsis thaliana
MEDASETSYWCHMCSRSVIPLIQDEIIKCNFCQSGFVEEMDNNDDHQAADSLWTPILMEMMNNNHDQHSTNQEDSESILEDEDEDEDDGDDGDQNNDGEIDITHQLEEIRRIRTRHSTAIVNLLQGIRAGLLIESENNEDNPDNSELVVLINSFNQRIRVHQDSVDTTSVPSGSLGDYFIGPGFETLLQRLAENDLNNRYGTPPATKEAVEALAMVKIEDSLLQCSVCLDDFEIGMEAKEMPCKHKFHSDCLLPWLELHSSCPVCRYLLPTGDDDEPKTDAETSRNDDNNEDISNASMASNGSSPDSSSNNSSVN

SEQ ID NO: 4551 - protein, 278 aa, Arabidopsis thaliana
MADQGLEESNPMDLSKHPSGIVPTPHSQVIYKMPPRIAAIRLVSSHREVYEPCDDSFALVDALLADRTNLIEHNPKICMEIGCGSGYVITSLILLLQNEVPGVHYLAIDTNPIATRVTKETLEAHGVNADVICADLATGLEKRLAGSVDVIVVNPPYVPTPEYEVGMEGIASAWAGGENGRTVIDKILPVVDLLLSEKGWFYLVTLTSNFPAEICLMMRKKGYASRIVVQRSTEEENLVILKFWRDKDEESQDKETSSSSFVSQFSKSLSSLMEKQWR

SEQ ID NO: 4552 - protein, 244 aa, Arabidopsis thaliana
MTEAESKTVVPESVLKKRKREEEWALAKKQELEAAKKQNAEKRKLIFNRAKQYSKEYQEKERELIQLKREAKLKGGFYVDPEAKLLFIIRIRGINAIDPKTKKILQLLRLRQIFNGVFLKVNKATINMLRRVEPYVTYGYPNLKSVKELIYKRGFGKLNHQRTALTDNSIVDQGLGKHGIICVEDLIHEIMTVGPHFKEANNFLWPFQLKAPLGGMKKKRNHYVEGGDAGNRENFINELVRRMN

SEQ ID NO: 4553 - protein, 753 aa, Arabidopsis thaliana
MSRLQKRGKQEKPVVSDGAQKVIVAVKASREIPKTALIWALTHVVQPGDCITLIVVVPSHNSGRKLWGFTKSFPMFAGDCASGHRKSHSEALPEIKSDLTDTCSQMILQLHDVYDPNKINVKIKIVSGSPCGAVAAESKKAQANWVVMDKHLKQEEKRCMDELQCNIVVMKRSQAKVLRLNLVGSPKKDAGKECPLPSGPEAASEKHSKNTKGLLDADRGLPVTPTSSPELGTPFTSTEAGTSSVSSSDLGTSPFFTLGMNGYMKKDGALVIKENDGLDDSGSETESENQSLASTSMRFQPWISEYIGTHRHSSQEAEESLLWKNDDRAQISTTKALLEKFSKLDVEVGLSSSRRMDLEFSGNVRDAISLSRSAPPGPPPLCSICQHKAPVFGKPPRLFTYAELELATGGFSQANFLAEGGYGSVHRGVLPEGQVVAVKQHKLASSQGDVEFCSEVEVLSCAQHRNVVMLIGFCIEDSRRLLVYEYICNGSLDSHLYGRQKETLEWPARQKIAVGAARGLRYLHEECRVGCIVHRDMRPNNILITHDNEPLVGDFGLARWQPDGEMGVDTRVIGTFGYLAPEYAQSGQITEKADVYSFGVVLVELVTGRKAIDITRPKGQQCLTEWARPLLEEYAIDELIDPRLGNRFVESEVICMLHAASLCIRRDPHLRPRMSQVLRILEGDMIMDGNYASTPGSEAGNRSGRFWADHYSGQLTNDGSDRFSERLSVETPRLALRERERSQRFELNHNKQY

SEQ ID NO: 4554 - protein, 296 aa, Arabidopsis thaliana
MAYHQPYDPFYVYQLHSHPHHLPPQLPLLADEPGAINTLFVSGLPNDVKAREIHNLFRRRHGFESCQLKYTGRGDQVCKNLQFLFFFIPIFRKAVVAFATFTSHRFALAAMNELNGVKFDPQTGSNLHIELARSNSRRKERPGSGPYVVIDNRNKEISKSQDDQSDEGDSDPDEVQEPGNSDSPKENDTTKSEADSEPDSKAPSANGHLEKASEGGSGARACSTLFIANLGPNCTEDELKQLLSRYPGFHILKIRARGGMPVAFADFEEIEQATDAMNHLQGNLLSSSDRGGMHIE

SEQ ID NO: 4555 - protein, 42 aa, Arabidopsis thaliana
MTRINREMVQIFFAKFSRSISSSSVLRRSISGVFSSFSVTET

SEQ ID NO: 4556 - protein, 595 aa, Arabidopsis thaliana
MSIPQSKSSSNGFPLKRGETEEVLHKTNTSNTVFNGEAGSLKRLSLDRLVYFTTCKIGHHVEVHLRNGSVYTGIFHAANVEKDFGIILKMACLIKDGTLRGHKSRSEFVRKPPSKTFIIPADELVQVIAKDLSVSSNNMSNAVQGEKPSELLTDSSISQSYHVDRERQLQRWVPDETIPHGADLENVFDNPWNRKWNQFEVNKSLFGVKSTFDEDLYTTRLERGPQTKQLEEHAQKIAREIEAETTRDIHVAEERGLQLNENFDFDEEARYSSVRPVTGFGDSGFDLEDNALLDTCNDLTFGGSSTSDGQKPASSGKGCEELRVSGDSQSSRKNKNVDQSCSTSKQQSKDFPAAGSNISESQLDEQRRKNNEEVSHNNRSAEESTSGHGDIKEGAKSGGGASSVSKAVTEREREASQVSSKTKSESSFGQSASRSSESRPGPSTSSRPGLSPSSSIGSMASSEKSTLNPNAKEFKLNPKAKSFKPLQSAAAPPQSPIADASFYYPGPSHVPVQQMPGMPPVNYGLPPYPGNQPQMMYHPQAYYHPNGQPQYPQQQMIPGQQQQQMIPGQQHPRPVYYMHPPPYPQDMPYHNKGRE

SEQ ID NO: 4557 - protein, 308 aa, Arabidopsis thaliana
MQEFHSSKDSLPCPATSWDNSVFTNSNVQGSSSLTDNNTLSLTMEMKQTGFQMQHYDSSSTQSTGGESYSEVASLSEPTNRYGHNIVVTHLSGYKENPENPIGSHSISKVSQDSVVLPIEAASWPLHGNVTPHFNGFLSFPYASQHTVQHPQIRGLVPSRMPLPHNIPENEPIFVNAKQYQAILRRRERRAKLEAQNKLIKVRKPYLHESRHLHALKRVRGSGGRFLNTKKHQESNSSLSPPFLIPPHVFKNSPGKFRQMDISRGGVVSSVSTTSCSDITGNNNDMFQQNPQFRFSGYPSNHHVSVLM

SEQ ID NO: 4558 - protein, 317 aa, Arabidopsis thaliana
MAALIRCCSSFSHTSGGQPPPRDKSRAPEIGKFATSIGYSVVRKPGDHPPFSKIIHSSSQPKERQGKGILQTPFASVGSLDKFSAFEVGIGRLKLPVMAVLLTNSLQMATPLEALAAEICEPESSMFSMPILLLVALIGATVGGLLARQRKGELQRLNEQLRQINAALRRQAKIESYAPSLSYAPVGARIPDSEIIVEPKKQELISKLKTGKTFLRNQEPEKAYTEFKIALELAQSLKDPTEEKKAARGLGASLQRQGKYREAIQYHSMVLAISKRESEDSGITEAYGAIADCYTELGDLEKAGKFYDTYIARLETD

SEQ ID NO: 4559 - protein, 1270 aa, Arabidopsis thaliana
MRPAIPLDYAVFQLSPKRSRCELFVSTTGNTEKLASGLVKPFVAHLKVAEEQVSREVQSIRLEVESNKNAGTWFTKGTLERFVRFVSTPEVLELVSALDVEMSQLEAARKIYGEGTSDQRSSAKDSTDTTPAADVTKKELLKAIDLRLAAVRQDLATACNRASAAGFNPITVSELSQFADRFGANRLNEACTKFITLCQRRPELMSSWRVNQEEEAIRSSWESDMSIDDPSEDPSRDLATNRNQQHREYQTGMEEQSATGTSYCQHESKLKPQSSHDENDEEEEKSTVQNEPLVSQPRQLTRRLSVQERISMFENKQKENSGEKTAVAKSTELKRLSSDLSSSAGMEKVVVRRWSGASDMSIDLGNDRKDDTGDSPLCTPSSSSVSKDGSGASSKQFVGYNKKEQNGLSHAANPHRNEEECTSNNGGDWGMDEVESQNSSSTFLPKDKEVDLNVPFRTNNQVRHQGNSPDRYLEKNSKYKFHEKNPRASSDYTGNANINDDANNQMSDFISNRQNQIQFRDPQSHSLSTLQQLGGTEPIITSVQSNGVTAESPRKELMPSDRQSPLLEDRQRKTPFSGGSEQMKRPHSRRPEMGSAAVNTKPSAAINSVSDISESDTLIQVSPTEQVQRARPSKGSQELNDELKVKANELEKLFAEHMLRVPGDQSSSVRRGKPGKPSEQAVTSQLRRPVAQDLSSVQISDQKTLAMPTLTSNDEDKFKTPPTMKMVVTKDYGDTTRQNFPEISFSDNSRGKFYEQYMQKRDAKLKEDWSCRRTEKEAKLKVMQDILDRSNAEMKTKFSQSTGRRDSSARRAEKLVYFNSKLSAKKDQHPISSFQSEEDEDGSRSTQNKKLQQNKNNLLIARTTATSASRSAAKVSTLSAVRRRGQSEKHFAQSVPNFSEIKKEGMKPASGVGKNGVRTQVRSSIRPKAVNEEEKLRRPKIFRKGAAEAAELATDFSQLKSEDGVSVPLYLEQEQSGRNFNSHGTGISSDNAQLKASEESEASDDMEKEGMGEALDDTEVEAFTDAENEMPRLSQESEEWGSTGVANGESFSQLDAGSNTELPAAMASRHQTMGSILDSPGESTSPWNSRVKHRYPNEASELDASVDSPVGSPAFWNFSSLNHTESDTTQMRKKWGAAQKRAAGGNPSQNQCQQDVTKGLKRLLNFGRKNRAAESLADWISATTSEGDDDTDDGRDLANRSSEDLRKSRMGFLQSHPSGDSFNESELFTEHVQTTGTPLSFKLKEDQTTGASVKAPRSFFSLSNFRSKGK

SEQ ID NO: 4560 - protein, 373 aa, Arabidopsis thaliana
MEITNVTEYDAIAKAKLPKMVYDYYASGAEDQWTLQENRNAFARILFRPRILIDVNKIDMATTVLGFKISMPIMVAPTAFQKMAHPDGEYATARAASAAGTIMTLSSWATSSVEEVASTGPGIRFFQLYVYKNRKVVEQLVRRAEKAGFKAIALTVDTPRLGRRESDIKNRFTLPPNLTLKNFEGLDLGKMDEASIDQIANDSGLASYVAGQIDRTLSWKDIQWLQTITNMPILVKGVLTGEDARIAIQAGAAGIIVSNHGARQLDYVPATISALEEVVKATQGRVPVFLDGGVRRGTDVFKALALGASGIFIGRPVVFALAAEGEAGVKKVLQMLRDEFELTMALSGCRSLSEITRNHIVTEWDTPRHLPRL

SEQ ID NO: 4561 - protein, 737 aa, Arabidopsis thaliana
MECSVIHHVVIVLLLLWVLSYLNRSHAVFYVLSLVYLYLVHERYVMRLRKKLQFEERKQANQRRVLSDSESVRWLNHAVERIWPICMEQIASQKILRPIIPWFLDKYRPWTAKKVVIQHLYLGRNPPLLTDIRVLRQSTGDDHLVLELGMNFLTADDMSAILAVKLRKRLGFGMWTKLHLTGMHVEGKVLIGVKFLRRWPFLGRLRVCFAEPPYFQMTVKPITTHGLDVAVLPGIAGWLDKLLSVAFEQTLVEPNMLVVDMEKFVSPESGDNWFFVDEKEPVAHALVEVVEACDVKPSDLNGLADPYVKGQLGAYRFKTKILWKTLAPKWQEEFKIPICTWDSANILNIEVQDKDRFSDDSLGDCSVNIAEFRGGQRNDMWLPLQNIKMGRLHLAITVLEDEAKLNDDPFEGVTICKEDMWASFASDVTNKGSFSSVVSDKSPRVPDNMEPINIEGQEETGIWVHQPGTEVSQIWEPRKGKSRCLDNKIQCAGSVRSTASTSPNNESSSTDKNQEGKSEMKSVGWGLKKIGLVFHKNGKKEECHHTGSIEEDIRSPRINLKALNQKDVGVKFIVEDRLSGPLTGRSPKGESFDSEDSQHKRHMKDVAKSILKHAEKSARHLKHAFSHKGSRKSRDDECSTVSEQDSECLSETSDDKSAFSNVQDLGTLRRAKLEGKTVKAGEDDNVNTSANSKDDSKNKETKKNLANLETTYSDARNSFAGAEKVTTPKNRKGIIGK

SEQ ID NO: 4562 - protein, 420 aa, Arabidopsis thaliana
MSDDQFHHPPPPSSMRHRSTSDAADGGCGEIVEVQGGHIVRSTGRKDRHSKVCTAKGPRDRRVRLSAHTAIQFYDVQDRLGFDRPSKAVDWLIKKAKTSIDELAELPPWNPADAIRLAAANAKPRRTTAKTQISPSPPPPQQQQQQQQLQFGVGFNGGGAEHPSNNESSFLPPSMDSDSIADTIKSFFPVIGSSTEAPSNHNLMHNYHHQHPPDLLSRTNSQNQDLRLSLQSFPDGPPSLLHHQHHHHTSASASEPTLFYGQSNPLGFDTSSWEQQSSEFGRIQRLVAWNSGGGGGATDTGNGGGFLFAPPTPSTTSFQPVLGQSQQLYSQRGPLQSSYSPMIRAWFDPHHHHQSISTDDLNHHHHLPPPVHQSAIPGIGFASGEFSSGFRIPARFQGQEEEQHDGLTHKPSSASSISRH

SEQ ID NO: 4563 - protein, 690 aa, Arabidopsis thaliana
MDDVAGLQEAAGARFSQIELIGRGSFGDVYKAFDKDLNKEVAIKVIDLEESEDEIEDIQKEISVLSQCRCPYITEYYGSYLHQTKLWIIMEYMAGGSVADLLQSNNPLDETSIACITRDLLHAVEYLHNEGKIHRDIKAANILLSENGDVKVADFGVSAQLTRTISRRKTFVGTPFWMAPEVIQNSEGYNEKADIWSLGITVIEMAKGEPPLADLHPMRVLFIIPRETPPQLDEHFSRQVKEFVSLCLKKAPAERPSAKELIKHRFIKNARKSPKLLERIRERPKYQVKEDEETPRNGAKAPVESSGTVRIARDERSQGAPGYSFQGNTVKNAGWDFTVGGSQSIGTVRALKPPQARERRQEVSPNRISQRTTRPSGNQWSSATGSTISEASEGGFVRRHPFQNDHEDGFHEEDDSSLSGSGTVVIRTPRSSQSSSVFREPSSGSSGRYAAFDDASASGTVVVRGQYDDSGSPRTPKSRLGIQERTSSASEDSNANLAEAKAALDAGFRRGKARERLGMGNNNNDGKVNRRREQMADDSDYSRNSGDKSSKQKVVPRSEQVSDEEDDSIWESLPASLSVLLIPSLKEALGDDSKESTVRTVSRSLVMMEREKPGSCEAFVAKLIELLGSSKEASVKELHDMAVCVFAKTTPDNAENKMKQANKEFSSNTNVSPLGRFLLSRWLGQSSRDL

SEQ ID NO: 4564 - protein, 424 aa, Arabidopsis thaliana
MGYVNVEKRWVFPLVITSLVCVFLLATSFNMGLVSSLRTINGIFSIIPSRLVKNQTRLDFAESKVARQTRVLPHEDKLPRFAYLVSGSKGDVEKLWRTLRAVYHPRNQYVVHLDLESPVNERLELASRINNDPMYSKTGNVYMITKANLVTYKGPTMVANTLHACAVLLKRNANWDWFINLSASDYPLVTQDDLLHTFSTLDRNLNFIEHTSQLGWKEEKRAQPLMIDPGLYLLNKSDIYWVTPRRSLPTAFKLFTGSAWMALSRPFVEYCIWGWDNLPRTLLMYYTNFVSSPEGYFQTVICNVPEFAKTAVNHDLHYISWDNPPQQHPHVLSLNDTMPMIWSGAAFARKFRRDDEVLNKIDKELLKRRNDKDSFTPGGWCSGKPKCSRVGNVAKIVPSFGAQRLQGLVTRLVNEANTGVSQCK

SEQ ID NO: 4565 - protein, 165 aa, Arabidopsis thaliana
MDLDPKKFAALLDKIEAEADEFLLARNQMVENDKERNANREALTALRKRARTTKTSVMSPFDSMMKDIHGSSTKPLVQEVCSTCGSHDSSEPTWMMLPGADLFAAIPFHAVHTMLEKDEEKMEFESKKLQSLVKEKALFISELGALADGISPGVIRSLVALEDKP

SEQ ID NO: 4566 - protein, 837 aa, Arabidopsis thaliana
MEGSSNSNSRGFNTSGVSDRNTEFLPVERLTTRSKPSSHVDEYVRSLFGSTSTHKSGEDDSLGIDPFVRSLEWGDVSLRQWLDKPERSVDVFECLHVFRQIVEIVNAAHSQGIVVHNVRPSCFVMSSFNHVSFIESASCSDSGSDSLEDGPISQKEIGSSRREEAVSKAIAIEEKGVYNKLLERKIEKLEEEKTQPFPMKHILAMETSWYTSPEEDFGSSSTCASDVYRLGVLLFELFCPVPSREEKSRTMSSLRHRVLPPQILLKCPKEASFCLWLLHPEPTCRPSMSDLLQSEFITEPRDNLEEREAAIELRDRIEEQESLLEFLLLIQQRKQESAYRLQDTVSLLSSDIEQVVKRQLILKKRGSSLSDFSKDDHQYTSGQPLMSFQANEEPSAFLASRKRVRQGILALENGVEVDEESQGSTLLESSRLMRNFKKLESVYFLTRRRQMKAAASGKSLTRHSPLSSENGRGSMIVSEKSSVSNPVAPKAFFNNDSRQGGWIDPFLEGLCRYLSFSQLRVKADLKQGDLLNSSNLVCALAFDREGELFATAGVNKKIKIFECNSIVNDNRDIHYPVVELAGRSKLSSLCWNSYIKSQIASSNFDGVVQIWDVARSQLVTEMKEHKKRVWSIDISSADPTLLASGSDDGTGVSIGTIKTKANVCCVQFPSDSGRSLAFGSADHKVYYYDLRNPKIPLCTMIGHSKTVSYVKFVDSSTLVSSSTDNTLKLWDLSMSASGINESPLHSFTGHTNLKNFVGLSVSDGYIATGSETNEVFVYHKAFPMPVMSYMFNNTDSMSGLEVDDASQFISSICWRGQSSTLVAANSNGNIKILEMMT

SEQ ID NO: 4567 - protein, 488 aa, Arabidopsis thaliana
MADRNCLISFEDLPSHLILEVLTSGRLSAVDLLSLELTSKVFGGSHGFYPLKFRSLADYAASQLCSMHPVYVGMGLTTQKELFANCEGNWKRLFSFLQSVEQSSDMVETSQGKMQIATGKYHTLLINNSKVYSCGVSLSGVLAHGSETTQCVAFTPIEFPFPAQVAQVSATQNHSAFVLQSGQVLTCGDNSSHCCGHLDTSRPIFRPKLVEALKGTPCKQVAAGLHFTVFLSREGHAYTCGSNTHGQLGHGDTLDRPVPKVVEFLKTIGPVVQIAAGPSYVLAVTQDGSVYSFGSGSNFCLGHGEQQDELQPRVIQAFKRKGIHILRVSAGDEHAVALDSNGRVYTWGKGYCGALGHGDENDKITPQVLVNLNNCLAVQVCARKRKTFVLVEGGLLYGFGWMGFGSLGFPDRGVSDKVLRPRVLECLKPHRVSQVSTGLYHTIVVTQRGRIFGFGDNERAQLGHDSLRGCLEPTEIFLHCGRSRSRLC

SEQ ID NO: 4568 - protein, 219 aa, Arabidopsis thaliana
MGMSLDFDVDLEKGIIDCDNVYTKSPEKPMSPDNKPVITGEESVGSLENDTSPVQCGINKPGWGRSDRKEKRKKSASKPPRPPRGPSLDAADQKLIREIAELAMLKRARIERMRALKKSRAAKAASAASSLGNVLATLFTAIFFFVLVFQGLSPRAAGSSGKSHLVVAGKANGGFVSVQYAGNPSASEPDGGYTGPVLAQRPNLLKPVSGLENEKKSSQ

SEQ ID NO: 4569 - protein, 710 aa, Arabidopsis thaliana
MADMRRRNGSGGSSNHERNEQILFPKPETLDFDLPCDTSFPQQIGDNAASSSGSNVKSLLIEMGFCPTLVQKAIDENGQDDFELLLEILTKSTETEPPGPSFHGLMEPKPEPDIEYETDRIRIALLTMKFPENLVDFALDRLGKDTPIDEMVDFIVAAQLAEKYAEESEDSLDGAEINEEDEDVTPVTARGPEVPNEQLFETMDKTLRLLEMGFSNDEISMAIEKIGTKGQISVLAESIVTGEFPAECHDDLEDIEKKVSAAAPAVNRTCLSKSWRFVGVGAQKEDGGGGSSSGTANIKPDPGIESFPFPATDNVGETSRGKRPKDEDENAYPEEYTGYDDRGKRLRPEDMGDSSSFMETPWMQDEWKDNTYEFPSVMQPRLSQSLGPKVARRPYFFYGQLGELSPSWWSKISGFLFGIHPEHVDTRLCSALRRTEGYLHNLPTVNRFNTLPNPRLTIQDAMPHMRSWWPQWDIRKHFNSGTCSNMKDATLLCERIGRRIAECKGKPTQQDQTLILRHCHTSNLIWIAPNILSPLEPEHLECIMGYPMNHTNIGGGRLAERLKLFDYCFQTDTLGYHLSVLKSMFPQGLTVLSLFSGIGGAEIALDRLGIHLKGVVSVESCGLSRNILKRWWQTSGQTGELVQIEEIKSLTAKRLETLMQRFGGFDFVICQNPSTPLDLSKEISNSEACEFDYTLFNEFARVTKRVRDMM

SEQ ID NO: 4570 - protein, 877 aa, Arabidopsis thaliana
MAPPGSIGVVDPGWEHGVAQDQRKKKVKCNYCGKIVSGGIYRLKQHLARVSGEVTYCDKSPEEVCMRMKENLVRSTKKLRQSEDNSGQSCSSFHQSNNDDEADEEERRCWSIRSKGKLGLSDGSLLRSSGYIDPGWEHGIAQDERKKKVKCNYCNKIVSGGINRFKQHLARIPGEVAPCKTAPEEVYVKIKENMKWHRAGKRQNRPDDEMGALTFRTVSQDPDQEEDREDHDFYPTSQDRLMLGNGRFSKDKRKSFDSTNMRSVSEAKTKRARMIPFQSPSSSKQRKLYSSCSNRVVSRKDVTSSISKFLHHVGVPTEAANSLYFQKMIELIGMYGEGFVVPSSQLFSGRLLQEEMSTIKSYLREYRSSWVVTGCSIMADTWTNTEGKKMISFLVSCPRGVYFHSSIDATDIVEDALSLFKCLDKLVDDIGEENVVQVITQNTAIFRSAGKLLEEKRKNLYWTPCAIHCTELVLEDFSKLEFVSECLEKAQRITRFIYNQTWLLNLMKNEFTQGLDLLRPAVMRHASGFTTLQSLMDHKASLRGLFQSDGWILSQTAAKSEEGREVEKMVLSAVFWKKVQYVLKSVDPVMQVIHMINDGGDRLSMPYAYGYMCCAKMAIKSIHSDDARKYGPFWRVIEYRWNPLFHHPLYVAAYFFNPAYKYRPDFMAQSEVVRGVNECIVRLEPDNTRRITALMQIPDYTCAKADFGTDIAIGTRTELDPSAWWQQHGISCLELQRVAVRILSHTCSSVGCEPKWSVYDQVNSQCQSQFGKKSTKDLTYVHYNLRLREKQLKQRLHYEDEPPPTLNHALLDRLLPDWLVTSEKEEEEALHGEDRAEKEDHEDDEEEEEKFYMESGNVDGEGEDNLDPYDDDLSDDD

SEQ ID NO: 4571 - protein, 80 aa, Arabidopsis thaliana
MASWKKTIATPFKKAATFFNQPQQSPKKGCRGRMDAQAREEHEKRMVQELQGEVMACGYDDVLVMWSILDKSNSSNNLSS

SEQ ID NO: 4572 - protein, 149 aa, Arabidopsis thaliana
MSLQRPNGNSSSSSSHKKHKTEESDEELLMVPDMEAAGSTCVLSSSADDGVNNPELDQTQNGVSTAKRRRGRNPVDKEYRSLKRLLRNRVSAQQARERKKVYVSDLESRANELQNNNDQLEEKISTLTNENTMLRKMLINTRPKTDDNH

SEQ ID NO: 4573 - protein, 334 aa, Arabidopsis thaliana
MENFGEGRRSGGGMLPLLALSAVAEYYRLPWKPPVTASLLAANTLVYLRPAFIDPVIPHISEVWFNPHLIFKHKDLKRLFLSAFYHVNEPHLVYNMMSLLWKGIKLETSMGSSEFASMVFTLIGMSQGVTLLLAKSLLLLFDYDRAYYNEYAVGFSGVLFAMKVVLNSQAEDYSSVYGILVPTKYAAWAELILVQMFVPNASFLGHLGGILAGIIYLKLKGSYSGSDPVTMAVRGVSRLVTWPLRFLNGMVRSRRRRITGRGRVGRGQTGIAGPGIWRCQSCTYDNSGWLSACEMCGSGRARGNGWSLNQGPALSSSNDLPLDELRRRRVERFS

SEQ ID NO: 4574 - protein, 211 aa, Arabidopsis thaliana
MQDPHVPSSPTISSVSSSDLDTESTGSFFHDRSITLGTLMGFSFTATMPMPFRASSRRHVSPSVAISRASSSNARRNHQRKRPPSNSAEPEPHRRRKWWRFCRDDDDDAAGNGIHRGTGDSKRSSLGEYLEVERRFGDEAVYNSAEAELEDAVVARYQDQQPVMGERALFADGRVLPPASAEVVTGEGTPVATSLCRFPVSLTGICSGGGG

SEQ ID NO: 4575 - protein, 376 aa, Arabidopsis thaliana
MDLVRCVLNSDLLMYSFLSLLVSSSVGKHRRKILVTTTCLGSGYLLYKLYNAHTRKLADLERELANERENDEIIKTQMKAHFDNIQMIADTTTLPHAIHHLSSRVVEEIDVSSIMDKLSKGKGILIPSEKLQLWNELKILSFTRMVLSLWSVTMLSLYIRVQVNILGRHLYIDTARGLGSSHLLDELDLIERDDEQKFLTSADFLATSGMPSLISNMQNAVKEVLKGKQLKDVLTTSALRETVMRILDVFMSTGSPHHWVDYLMMSQDATTDVSSSDATVTKFHLLITETREVLTSNDFSNVAEISLKCCAVALVEEMETQTGLATGMQLAKLLPQIEKTMPEISAEPEKNRFLQLIRDLPEVKLFFTLLYANMPQ

SEQ ID NO: 4576 - protein, 815 aa, Arabidopsis thaliana
MGRRIKRKGLINTEAAREFINHLVAERHSLLLLVPLVLAFWAIERWVFAFSNWVPLVVAVWASLQYGSYQRALLAEDLTKKWRQTVFNASTITPLEHCQWLNKLLSEIWLNYMNKKLSLRFSSMVEKRLRQRRSRLIENIQLLEFSLGSCPPLLGLHGTCWSKSGEQKIMRLDFNWDTTDLSILLQAKLSMPFNRTARIVVNSLCIKGDILIRPILEGRALLYSFVSNPEVRIGVAFGGGGGQSLPATELPGVSSWLVKILTETLNKKMVEPRRGCFSLPATDLHKTAIGGIIYVTVVSGNNLNRRILRGSPSKSSEIGEGSSGNSSSKPVQTFVEVELEQLSRRTEMKSGPNPAYQSTFNMILHDNTGTLKFNLYENNPGSVRYDSLASCEVKMKYVGDDSTMFWAVGSDNGVIAKHAEFCGQEIEMVVPFEGVSSGELTVRLLLKEWHFSDGSHSLNSVNSSSLHSLDSSSALLSKTGRKIIVTVLAGKNLVSKDKSGKCDASVKLQYGKIIQKTKIVNAAECVWNQKFEFEELAGEEYLKVKCYREEMLGTDNIGTATLSLQGINNSEMHIWVPLEDVNSGEIELLIEALDPEYSEADSSKGLIELVLVEARDLVAADIRGTSDPYVRVQYGEKKQRTKVIYKTLQPKWNQTMEFPDDGSSLELHVKDYNTLLPTSSIGNCVVEYQGLKPNETADKWIILQGVKHGEVHVRVTRKVTEIQRRASAGPGTPFNKALLLSNQMKQVMIKFQNLIDDGDLEGLAEALEELESLEDEQEQYLLQLQTEQSLLINKIKDLGKEILNSSPAQAPSRDS

SEQ ID NO: 4577 - protein, 345 aa, Arabidopsis thaliana
MEDSSQGSFVATINEDYEAICWGCGLNLVLPSYAPVFKCGWCGAITNQNPVRPETKSFGLRRFRDRCFVVILAVFMLFVICGGIWAAYPVLFSISLACGIFHSVTTATLAISTLSTFILVAFKCAGKPTNILYGTHPGVGNGALNNYTFCNYCSKPKSPRTHHCRTCGMCVLDMDHHCPFIGNCVGAGNHKYFIAFLISAVISTSYAAVMCVYTLIHILPPIEKGAAYASDVAHVAHGNSISILRVVKNICLTYIANAVFISVRSLVLVYLFVASVSVAIGLSVLLWQQLSYIYEGKTYLSHLSSQGTEEDGEKSCRNLLTFFGCPHSIERHLPTIRNLRKRHKT

SEQ ID NO: 4578 - protein, 625 aa, Arabidopsis thaliana
MSSSHNRSNNNNSEGAKAEQIIFEFFAKSLHIILESRTPFMSSRNFSGEQMICSPSSSSSSSSSVRPRDKWFNLALRECPAALESFDIGRRSSLEPLVVDVVLVVRPLVGDQSGKRELIRNFSGKDYQSGWNSDQDELGCETKNEQIIERWVVQYDNRKIRESVTTSSRRSSSNKLQVMYKKATLLLRSLFVMVRLLPAYKIFRELNSSGQIFKFKLVPRVPSIVEPFTRKEEAEMQKFSFTPVETICGRLCLSVLYRSLSDVSCEHSTPMSPTFITDYVGSPLADPLKRFPSLPLSYGSPPLLPFQRRHSWSFDRYKASPPSVSCSPSPTRSDSHALVSHPCSRHLPPHPSDIPTGRRKESYPEEYSPCQDFSPPPSPSAPKHAVPRGITRTESAPVRIPAPTFQSKENVVAPSAHLKLSRHASLKPVRNLGPGESGAAIDKLFLYGRDDFRRPSGVRPSSSSSPRISFSRSSSRSFQDDFDDPDFPCPFDVEYDDITDRNSRPGSFDHRGDIHEPFDSSGSYPKKSQDAAVGALVRMLKKAPPLRQDVSESSRPEICSNNNKPAGAHEIAVASITASGIALASKTTADALEELRSYKEMKNHLLLGQSTSNPSSVTITSPFDV

SEQ ID NO: 4579 - protein, 360 aa, Arabidopsis thaliana
MPHCFTFKPASPEGSLGDDHLPHPSPEGSVASTFNLSHELAHAFQTPSYHDIRSRLLVIDPTQENLELFLSQELRPNNESVQEALSLRHAKQTTLTNLVSTYFQHSEDATRFCLNLYQNVHSARCHLYTPLLDLFNIFPRDSHSAIDESFCNLAFDVFLKLDTFENPFASPESHSFQDTQLCFYQLADKLDTRIRKSKSRVRLLHHATAGSALCLVTAVVVVAASAAFIAYHALPTILVVAGPLCTPYLPHSFKKKELSNIFQLNVAAKGTFALNKDLDTIDRLVSRLHTGVKNDKLLIRLGLERGRDVYTIPEFVKQLRKSHVNHTHQLEVLVDHICRWFTNVNKSRSLLLKEILRPQT

SEQ ID NO: 4580 - protein, 477 aa, Arabidopsis thaliana
MAKWRLATATLRRQLQSSSPTISTFKNPTKALSAAAHQSTRSYSTTQTDDSRGKWLTLPPFSPTIDGTAVGKDLLSDGDSVKSSTDNSKTTALRWILRCRPDLPRTLVQKLFRLRQVRREMSMSVDGDELQRSQLKRVAAKESLNVGDRIYLPLSVDNDTPQTPPAKKESFQCSDEERKFVCSLVLYKDPAIIVLNKPHGLAVQGGSGIKTSIDELAASCLKFDKSESPRLVHRLDRDCSGLLVLARTQTAATVLHSIFREKTTGASAYGVKKNVKSLKRKYMALVIGCPPRQRGQISAPLRKVVVDDGKSERITVNDNGELVSTQHAITEYRVIESSPHGYTWLELRPLTGRKHQLRVHCAEVLGTPIVGDYKYGWQAHKAREPFVSSENNPTKQSSSPFGLDLDGGDVSSKQPHLHLHSKQIDLPNISQLLEKMQVSSDSDISDLDSLKFDAPLPSHMQLSFNLLKSRVETCDKN

SEQ ID NO: 4581 - protein, 502 aa, Arabidopsis thaliana
MGKVLVMLTAAAAVVACSVATVMVRRRMKGRRKWRRVVGLLKDLEEACETPLGRLRQMVDAIAVEMQAGLVSEGGSKLKMLLTFVDDLPNGSETGTYYALHLGGSYFRIIKVHLGGQRSSLEVQDVERHSIPTSLMNSTSEVLFDFLASSLQRFIEKEGNDFSLSQPLKRELAFTFSFPVKQTSISSGVLIKWTKGFAISEMAGEDIAECLQGALNKRGLDIRVAALVNDTVGALSFGHFHDPDTIAAVVFGTGSNACYLERTDAIIKCQNPRTTSGSMVVNMEWGNFWSSRLPRTSYDLELDAESMNSNDMGFEKMIGGMYLGDIVRRVILRMSQESDIFGPISSILSTPFVLRTNSVSAMHEDDTSELQEVARILKDLGVSEVPMKVRKLVVKICDVVTRRAARLAAAGIAGILKKVGRDGSGGGRRSDKQIMRRTVVAVEGGLYLNYRMFREYMDEALRDILGEDVAQHVVVKAMEDGSSIGSALLLASSQSVQTIPSV

SEQ ID NO: 4582 - protein, 780 aa, Arabidopsis thaliana
MKAQKGSSKKKGTNSGLVAVAVDNNKGSQHALKWAADHLVSKGQTIILLHVILRSSSDSGEITAEKHKQAENLFVTFHCYCSRKEIQCLDVTLEDDNIVKSLAEYVSSGVIENLILGAPSRHGFMRKFKISDTPSNVAKAAPDFCTVYVISKGKISSVRHASRAAPYRSPLMGQIENHSEIINYEKFRNTMSFRDRAPPRSSTASSIEDYGKSPMARTSNYANSFFDLEDSENDISFVCSGRPSTASSGRPSTSTGRSDISFVSSGRPSTSTTGSPSFIYDFPDSGLTPRESTSSGHSMRLGIRFNDTNIQHDFSFVSQDSGRSSCSCSPQNLEEVEAEMRRLKQELKHAIDMYGSACREALAAKQEAKELQRQKIEEEGWVQEGQLSEKSTKSIVEKERAHKAAKDASETAGKIAELETQRRAIEAAGSFSDSSLRYRRYVIGEIEEATNSFDKANKIGEGGYGPVYKGYLDHTPVAIKALKADAVQGRSQFQREVEVLSCIRHPHMVLLIGACPEYGVLVYEYMAKGSLADRLYKYGNTPPLSWELRFRIAAEVATGLLFLHQTKPEPIVHRDLKPGNILIDQNYVSKIGDVGLAKLVPAVAENVTQCHVSSTAGTFCYIDPEYQQTGMLGVKSDVYSFGILLLELLTAKRPTGLAYTVEQAMEQGKFKDMLDPAVPNWPVEEAMSLAKIALKCAQLRRKDRPDLGKEVLPELNKLRARADTNMEWMMFNLSRGRLTPNHSQVSLPPVDELSVCSDKSYTHSSTVSDTEKNSDQNEED

SEQ ID NO: 4583 - protein, 437 aa, Arabidopsis thaliana
MDFLKVRKFRKSRKPNLEKEKEDKILAQQEQARSENTEAGVIDSGKGDEIEDDDDDFITNEVKRRLKELRRNSFMVLIPEEEEEEEEESYLDEDDDDGEDKCSSEWRDVVAEGLQWWGGFDAVYEKYCERMLFFDRLSSQQLKETGIGIAPSPSTPSPRSASKKLSSPFRCLSLKKFDVPEEDIEHLQPTEVDDPYQDLETAYVAQLCLTWEALHCQYTQLSHLISCQPETPTCYNHTAQLFQQFLVLLQRYIENEPFEQGSRSELYARARNAMPKLLQAPKIQGSDKKEMEKDTGFMVLADDLIKVIESSILTFNVFLKMDKKKPNGGIHLFGNHNNNHVNSTTPLLLVQSSIDKKRVKAKELSKKTKGLRKKSWPQTWEGVQLLFAAIDIKLATRVLRMSKISKEQLLWCEEKMKKLNFSAGKLQRHPSPILFPC

SEQ ID NO: 4584 - protein, 265 aa, Arabidopsis thaliana
MEGEESLLDAINEEDGFENLEDVEMVDVEEGEIVVDHDLDSGERQNDDGDGVKDKEAILGEKNGLQQTNKNKRKKKKKKRKGPVMDKPMSVDWFVRDTCRRLKEKKSYMIYTAVGCLGIAALSDLVNEVVAIETCGGQVTADGTRKRTSGGVLWNIIKARQPEAYREIMKKTKEFEKQFRQPNTRPKSGPKRDQGSSSEGLASGNVSADEALVSEMCVMPVAEQTESKPEKERKSVHERIRVPVSYDDLFRDAPLDDSLAHHPSA

SEQ ID NO: 4585 - protein, 391 aa, Arabidopsis thaliana
MVKTRAQRIKRMSVVDALCIRSQISVKSARYCKTVSKHLAKLQLAESGKNSSLVVCPSMGKTMKLYSMDAKRCKLSLLSTIDPSQRTPEVFMYMISSYNGIICCVNMIYDEDVENKFCDLQIWICNPITKETLLLPQGTPSFEFEPSIGVAYGSDVSDYKVYRIFCTGKIIPEERGPAEGFYVQEGRFFTKYGHSLAYECEVYSSSTGSWKNIGTVPCLPMSCSLRPYRRTGHIFVGGKVYWLVSLDAPGKILSVDLEGKFEVINLPAYADGLREDEQITEASHLINLKGSLGLLVLHPENMDVWVWKHDGERYSWVFQFKDVVPIKDDELILAVTALDNKIICVNETHWRIYDMETEKWKRRKSPRTGFRNPVVLPFTESVLPCNGGVKQ

SEQ ID NO: 4586 - protein, 429 aa, Arabidopsis thaliana
MSGATTASSGDHNNLRLPTPTLDAESQTLLQSISAEGGYAYARMAVLAVAGDQSAAEAARDMAWEQLHSGPWHSVLPVWRDAYSMACLHVAKIHFAAGEFGEALGALDMGLIMGGMLLRKDLHDSVLLVSSEARKMTKSLEEASGDFKGERLVPEVPVDVNEVRHVLANLQLLVLKILPCRSLTCKRVEKRSGLSLEGFLRDYYLPGTPVVITNSMAHWPARTKWNHLDYLNAVAGNRTVPVEVGKNYLCSDWKQELVTFSKFLERMRTNKSSPMEPTYLAQHPLFDQINELRDDICIPDYCFVGGGELQSLNAWFGPAGTVTPLHHDPHHNILAQVVGKKYIRLYPSFLQDELYPYSETMLCNSSQVDLDNIDETEFPKAMELEFMDCILEEGEMLYIPPKWWHYVRSLTMSLSVSFWWSNEAESSSS

SEQ ID NO: 4587 - protein, 276 aa, Arabidopsis thaliana
MDSQMLVALGLSLVGGLSTSLGALFVVLSETPNMKMLGLLQGFASGLMLSISFLDLAHNAINSIGFFKANLWFFGGVIFFACITKFIPEPTLGPSTDGKRRKKNGDEGGKDMMKKHRKQVLYSGLITAIGISLHNFPEGMAVFLGSIKGMRVGVNLALAIALHNIPEGVAVALPIYFATESKWQAFKLATLSGLAEPLGVIIVAYLFPRSLSPEILEGLLGAVGGIMAFLTLHEMLPLAFDYAGQKQAVKAVFFGMACMSASLYFLELSLPETMSL

SEQ ID NO: 4588 - protein, 1464 aa, Arabidopsis thaliana
MAAFIGSLPWCDVELNLASSCFQRTAIAFVNLLFLCIFYLFLIASCVSTHFIVRGRKKGWIFVAVAICCAITSFIFLGVGLNSLIHGGNDVTEISWVACFVEGIIWVSLAVSLLVNGSKWVNILVSVWWVSFALLDLVAKSGILLQGNGIRILDILTLPMSLLLLLCSWMNLRSSSAAAQDCSVTGLSDPLLTKNPRKESARLATAGFFSILSFSWMNPLLSLGFKKPLSPEDIPSVVPEDEAQLAYKKFSQAWDTLLGDESSTKERNLVFRAVVKVYFKENIFIAVFAFLRTFAVVSLPLMLYVFVDYANSDHRDLRNGFFNLACLVMLKLVESLTMRHWYFASRRSGMRIRSALMVAAYKKQLKLSSLGRKRHSSGEIVNYIAVDAYRMGEFLWWFHSGWSLSLQLLLSTAVLFGVVGAGAFPGLILLLLCGLLNLPFAKMLQNCQTQFMIAQDKRLRSTSEILNSMKVIKLQSWEDEFKKKIESCRDDEFTWLAKAQLTKAFGSFLYWMSPTIVSSVVFLGCALLKSAPLNASTIFTVLATLRVMSEPVKIIPDAISAIIQGNVSFQRLNNFLLDDELKMDEIERSGLDASGTAVDIQVGNFGWEPETKIPTLRNIHLEIKHGQKVAVCGPVGAGKSSLLHAVLGEIPKVSGTVKVFGSIAYVSQTSWIQSGTIRDNILYGKPMESRRYNAAIKACALDKDMNGFGHGDLTEIGQRGINLSGGQKQRIQLARAVYADADVYLLDDPFSAVDAHTAGVLFHKCVEDSLKEKTVILVTHQVEFLSEVDQILVMEEGTITQSGKYEELLMMGTAFQQLVNAHNDAVTVLPLASNESLGDLRKEGKDREIRNMTVVEKIEEEIEKTDIPGVQLTQEEEKESGYVGMKPFLDYIGVSRGWCLLWSSVLGQVGFVVFQAASTYWLAFAIGIPKITNTMLIGVYSIISTLSAGFVYARAITTAHLGLKASKAFFSGFTNAVFKAPMLFFDSTPVGRILTRASSDLNVLDYDVPFAFIFVVAPAVELTAALLIMTYVTWQVIIIALLALAATKVVQDYYLASARELIRINGTTKAPVMNYAAETSLGVVTIRAFGTAERFFKNYLNLVDADAVLFFLSNAAMEWVILRIETLQNVTLFTCALLLILIPKGYIAPGLVGLSLSYALTLTQTQVFLTRWYCTLSNSIISVERIKQYMNIPEEPPAIIDDKRPPSSWPSNGTIHLQELKIRYRPNAPLVLKGISCTFREGTRVGVVGRTGSGKSTLISALFRLVEPASGCILIDGIDISKIGLKDLRMKLSIIPQEPTLFRGCIRTNLDPLGVYSDDEIWKALEKCQLKTTISNLPNKLDSSVSDEGENWSVGQRQLFCLGRVLLKRNKILVLDEATASIDSATDAIIQRIIREEFADCTVITVAHRVPTVIDSDMVMVLSFGDLVEYNEPSKLMETDSYFSKLVAEYWASCRGNSSQNLQL

SEQ ID NO: 4589 - protein, 645 aa, Arabidopsis thaliana
MGSSDERNCKAIDASVGGLVWVRRRNGAWWPGRIMAHHEVPDGTIVSPKSGTPIKLLGRDDASVDWYNLEKSKRVKAFRCGEYDACIATAKATASTTGKKAVKYARREDAIAHALEIENAHLAKDHPPCIEKASTSGEVSRKGIEDSGDVAETEVALQSTMSLKKTKNGKASKVQPLSEKRRRTPNDSEDDGTQTNKRMRGLEDIGMGTGSKGKVQVGALLEDTQENGFKSDTNNINDSVSNGSLSNGSSRDCSPSMKRKRSPVVIANDYSKRKNRRRTLTKVLESTATVSIPGTCDKLVNSDCLSLPGVSESDNNSDSNEVFSENVSENIVEVINDKGKESEVSNISVLAKDDSSNGLFDVPLNGDEKYPSGISTVPFTSSSPRKALVSGPTRRFGQSSHDDVVKSEGSNGSPSTSPAATLFNGIKKSTSKWQLKGKRNSRQMSKKQVERRNAYAEEANNNALPHWSVSDQKPRSLFSVGTQAMGRNSELYDVKIEVKANYKPRNVPLISLRSKLNGEAIVGHPSVVEVLEDGSCGHIVSSHRIDDAKPKPSSKKKSKKKKPHFPPQASKSKKSSSLAIKTRCLSALSGQKLTLSSKKKVMIESTKERIVACIPLKVVFSRINEAVKGSARQVHRSLPSAGNTG

SEQ ID NO: 4590 - protein, 383 aa, Arabidopsis thaliana
MGMEEGIKDNAASAPNSRPTNQLKALLPMRVLQVFLLFFVLVLGISVISMHMIKYLKIQTLAPSTLISTYDERITLESLIKPPLNGWHSMNDSELLWRASMEPRILDYPFKRVPKMAFMFLTKGPLPFAPLWERFFKGHEGFYSIYVHTLPNYRSDFPSSSVFYRRQIPSQHVAWGEMSMCDAERRLLANALLDISNEWFVLLSEACIPLRGFNFVYRYVSRSRYSFMGSVDEDGPYGRGRYSYAMGPEVSLNEWRKGSQWFEINRALAVDIVEDMVYYNKFKEFCRPPCYVDEHYFPTMLSIGYPDFLANRTLTWTDWSRGGAHPATFGKADITEKFIKKLSRGKACFYNDQPSQVCYLFARKFAPSALKPLLKLAPKVLGF

SEQ ID NO: 4591 - protein, 292 aa, Arabidopsis thaliana
MAQSCLKIVRINNLRNRVNRRILILRRFTRLLWSRIVACTPGKSRRYLLLSRALPSPTVSRPSPSPIPAVDVVVGGGGGGGEFVRRSSVVYDNDNSHRRSDSDLVSLKISLLGDPEIGKTSFLAKYVGEEKEVEMRELEKGINCTDKTLYMGGARISYSIWELEGAERSRDQIPVACKDSVAILFMFDLTSRCTLNSVISWYQQARKSNQTAIPVMVGTKFDEFIQLPIDLQWTIASQARTYAKALNATLFFSSASYNINVNKIFKFVTAKLFDLPWTVERNLTIGEPIIDF

SEQ ID NO: 4592 - protein, 67 aa, Arabidopsis thaliana
MCMFCGLYLWSLTHTLCKSNNDKSISLLSFWFRGFIHRMFMLEVKTKKIILNGMIHISVFSPHVLYI

SEQ ID NO: 4593 - protein, 267 aa, Arabidopsis thaliana
MLKKRSRSKQALMAETNQSQNQKQSKTTPFPRLFTAFSSFKSFTENDAVASPTSILDTKPFSVLKNPFGSDNPKTQEPETRLKLEPKRIGLAIVDSLIQDETPEPGPRSGTILFGSQLRIRVPDSPISSSDFGIKTRNSQPETKKPGSESGLGSPRIISGYFPASDMELSEDYTCVTCHGPNPRTIHIFDNCIVESQPGVVFFRSSDPVNESDSDYSPPDSFLSCCCNCKKSLGPRDDIFMYRGDRAFCSSECRSIEMMMSEENDTK

SEQ ID NO: 4594 - protein, 378 aa, Arabidopsis thaliana
METRNETKASPENNLRNRGADGNNSKKDMIFRADKIDLKNLDIQLEKHLSRVWSRSIEKHPKPKEEWEIELAKLEMRNVIARGAYGIVYKGIYDGQDVAVKVLDWGEDGYATTAETSALRASFRQEVAVWHKLDHPNVTRFVGASMGTANLKIPSSAETENSLPQRACCVVVEYIPGGTLKQYLFRNRRKKLAFKVVVQLALDLSRGLSYLHSERIVHRDVKTENMLLDYQRNLKIADFGVARVEAQNPKDMTGETGTLGYMAPEVLDGKPYNRRCDVYSFGICLWEIYCCDMPYPDLSFADVSSAVVRQNLRPDIPRCCPTALATIMKRCWEANPEKRPEMEEVVSLLEAVDTTKGGGMIPEDQRPGCFCFVSGRGP

SEQ ID NO: 4595 - protein, 370 aa, Arabidopsis thaliana
MPFTMKIQPIDIDSSPTVARAESGNKPVLKSRLKRLFDRPFTNVLRNSTTTTTEKPFVVTGGEVQCGGVVTEFEPSSVCLAKMVQNFIEENNEKQAKCGRNRCNCFNGNNDGSSDDESDLFGGSIDGCDASDHLKSLIPCTTVGERNLLADAAKIVDKNKSVKRKDDMKKIVNEGLLSLNYNSSICKSKWDKSPSFPAGEYEYIDVIIGEERLIIDVDFRSEFDIARQTSGYKVLLQSLPFIFVGKSDRLSQIVFLISEAAKQSLKKKGMPFPPWRKAEYMRSKWLSSYTRASVVVVDETVTVTDVTAADAAVEKEVDSVEIELVFEEKCLSPRVIVNSSSSPTDGDDDVAVEREVKAVTGLASLFKEKP

SEQ ID NO: 4596 - protein, 531 aa, Arabidopsis thaliana
MVSEAWIVKMRNQVSSNLKHALLLESSSTKKTPKPVSLPKQTIGILSFEVANVMSKTIHLHRSLSDTEISKLKAEVFHSEGVRKLVSSDENHLLDLSVSEKLDDLSRVASVVSRLGKKCNEPALQGFEHVYEDIVNGAIDFRKLGFLVKDMESMVKKMERFVNATCSLYCEMEVMNELEQAIVKLQRSQQHQESVKAFEQKLMWQRQDVKSLRDGSLWNQTYDKVVEMLARTVCTIYGRIETVFGGLGLRGKKDVTLKRDRSKNEASKAVNSRSVAGFKDSRRSEADEFTRAGDFNFPCGTNPGRMFMECLAMNRTIGDDDDDDDEDGGRITFPLSTARMIRSNKFGFKSRLTQHASASTIGGSALSLHYANVVIVVEKLLKYPHLIGEEARDDLYQMLPTSLKTTLKASLRSYLKNISIYDAPLAHDWKETIDGILSWLAPLAHNMIRWQSERNFEQQNQIVKRTNVLLLQTLYFADREKTEAAICKLLVGLNYICHYEQQQNALLDCASSFDYEDCFEWQSQCRAAYLD

SEQ ID NO: 4597 - protein, 262 aa, Arabidopsis thaliana
MWLKIRGIPIQYLCDGTVREIASSMGEVMEVELDDGMVDLSSVRARVNVCVDTRLCFKKVARFDSGEVKIVSFRYEDIGMSKARFKFCFNCGDMNHLARNCLIPWVDVPDPYERSLSPPPHESNSDGSAEGNCGDGGTSSGTLELLELVDAVQDFPVGDGEQLELAGVVQDLPVGDGEQQQQGLDGVEEANATQVDSEMVGISSEGSKRKFDAVEQGDENPEKRLRGITDATEGGSTDATQGGSTDATEEGLGVSLKPLQGE

SEQ ID NO: 4598 - protein, 333 aa, Arabidopsis thaliana
MGDSEDETGYPKKFYSLNRQNHPMYSRPIPKRHAYYNEEEDEDEVEGEEEDPQGGYIRGNERFQKRQKPNKVVSGFEFAGPSDAKVAYDWREQEAFVLLEVWGDRFLQLGRRSLRNEDWNEVAEKVSEELRMEKSETQCRRMIDDLKRKYRKEKIKVEKSGLGSSKWSFFNKLDMLLCVSPKSDLGLACGVDSGEFVFMNTKVYLDKSNGFDEMMDSPGDSEEEEDEDDEVEYERKKVNDAASYKMLADSVERFGKVYEKMEKSKKEQMKELEKMRADFQRDLELQKKQIVDRAQSEIARLREEEENHHGGGDDDESEDEEMENDSDVNLSDE

SEQ ID NO: 4599 - protein, 349 aa, Arabidopsis thaliana
MAVSATGFEGFEKRLEISFFETTDFLDPQGKSLRSLTKSQLDEILTPAECTIVSSLTNSFVDSYVLSESSLFVYPYKIIIKTCGTTKLLLSIPHILRLADSLCLTVKSVRYTRGSFIFPGAQSYPHRSFSEEVALLDDYFGKLNAGSKAFVMGGSDNNPQRWHVYSASSTEESAVCDKPVYTLEMCMTGLDNIKASVFFKTNSVSASEMTISSGIRNILPGSEICDFNFEPCGYSMNSIEGDAVSTIHVTPEDGFSYASFETVGYDLKALNFKELVDRVLVCFGPEEFSVAVHANLGTEVLASDCVADVNGYFSQERELEELGLGGSVLYQRFVKTVECCSPKSTLGFC

SEQ ID NO: 4600 - protein, 389 aa, Arabidopsis thaliana
MGYIGAHGVAALKKHKYSGVDHSYLAKYVLQPFWNRFVKIFPLWMPPNMITLMGFMFLLTSALLGYIYSPKLDSPPPRWVHFAHGLLLFLYQTFDAVDGKQARRTNSSSPLGELFDHGCDALGCALETMAYGSTAMCGRDTFWFWVISAVPFFGATWEHYFTNTLTLPVVNGPTEGLALIYCGHFFTAIVGAEWWAQPFGKSIPLFSWVPFLNEMQMSRIILFSMIFFAVIPTLAINTSNVYKVVHSRNGSMLLALAMLYPLVTLIAGVLIWDYLSPIDLIRNYPHLVVLGTGLAFGFLVGRMILAHLCDEPKGLKTNMCMSLLYLPFALANALTARLNDGVPLVDEFWVLLGYCIFTLSLYAHFATSVIHEITTALGIYCFRITRKEA

SEQ ID NO: 4601 - protein, 423 aa, Arabidopsis thaliana
MKERGKRTAMERRNDDVSLYYSTPSEFTCRKHPSVSSGVGICPYCLNDRLVNLVCSECGEQRLSSCSCSDISPTRTVDAAVDAAVGENVVRISSLIDEERAKQRKETKQRKTEEVVVFKRSSSSCVEINKRTKNHRFSRIGRFFRKINLKKERDFEKNNNNDSWVLDYNNDVKKLGVSRSRSLCSFRGKDLYCIGSEEDGSSYSGAFSAARSSSVNGGLGLCETEYSRKSNFEGRKSNFSETTEHWKSNFEGGRKSNFSETTTENRKSNFSESEPPRRSGFEARKSNFSETEYPTRRSNFSETEYNTRRGNNPATAENHPRRSSNYEAARKSDSAAMNFTRRVMSMKESSYFTGGEEPGFIDLKFDSSGGGGGDVNDGVLEHGGGGSCRKDGGELRKSRKSFKGWKWIFGHHQHQLHHHNRDS

SEQ ID NO: 4602 - protein, 160 aa, Arabidopsis thaliana
MEDLNAFAADCVVVSCCCNCLVLQIAIFIFLGLPQKLVKNTRKCYTKWGINRRIKRMGLCFECRENTEVDSEWRKESMMMSMEMEGFGCIEEVEQVLEEFSKNGEFLFGSFWGQERVQNSSSMSNCGNDNFDLRFVSRYEIIEENFYSLDYIFTTSHKLC

SEQ ID NO: 4603 - protein, 935 aa, Arabidopsis thaliana
MANDKQIESHHRKHHRSSSSSDDTEKASKRHKHRHHKHHHHRHRHHRDKKRENEIPSAGDETEILDVTPAAPIVVSNGCEEEDVEEGEILEEDGIGDVLMKTADSDGESGEIKFEDNNLPPLGEKGRQGEEKSSNGVLTRESEREDKRWDKEAGGPSERVSKLSYDNGRSSFSPSNSRQSNEGRARSRSKSHDRERETSRSRFAEDEFSDRGRHHDSSRDYHHDRVDSVRTEERYHRRGRYEENDRQYSREVLERDRSKERDMDREGSIRDRDSEGSKRRDKDSDRRREREREKRREIESDRERRKEKERERSIDRDRRKEREGDYLRDRANERGRSRDRTRYNSRERKREKEREGEKDWERGRETQKDREKYISSDVDYGEMRHKQSRNTRYDAVDDLEMRKPNSLKAHNSKGDKLEETWANDERSRNEDGQDDNDEGLTWKSPEEEEEELLNRIKEESRKRMEAILEKHKRKPEQQNELLTQDNGKDIVPETGAPVSTSPAVVIAANVGQAKTNLDFDTVAAKAPLIAGGPPTMSGISDSEKNQAQAGLGEGSPKSERSADMFHDDIFGESPAGIRKVGGKGDGVPMVRSGLHDNWDDAEGYYSYQFGELLDGRYEVIATHGKGVFSTVVRAKDLKAGPAEPEEVAIKIIRNNETMHKAGKIEVQILKKLAGADREDRRHCVRFLSSFKYRNHLCLVFESLHLNLREVLKKFGRNIGLQLSAVRAYSKQLFIALKHLKNCGVLHCDIKPDNMLVNEGKNVLKLCDFGNAMFAGKNEVTPYLVSRFYRSPEIILGLTYDHPLDIWSVGCCLYELYSGKVLFPGATNNDMLRLHMELKGPFPKKMLRKGAFIDQHFDHDLNFYATEEDTVSGKLIKRMIVNVKPKDFGSIIKGYPGEDPKILAHFRDLLDKMFILDPERRLTVSQALAHPFITGK

SEQ ID NO: 4604 - protein, 453 aa, Arabidopsis thaliana
MALNFSHRPFSSHLSEEPMMIANGNWCSSFDNGRKNTGGDASSVDILDVLPSDPFGMDINNTFTAITGWLEDLEDDYNNQYGRRRRDDIWIGDGNRQQLFAGLSFFWNNAMQFQSSGYSYGSESLFGGAFDGSLFSTCKFPESSGENNGFGGALDGDGSCHGAFISASSVDEVLSHENARNGEVVGSSDRCNNGEEDAYVHPAIGFCLYHLRGKDLLSVSMVCKSLHTTVCDDTLLWKHIHICRPLNEKITEEALLHLTERAQGTMQCLRIVDCCRITDDCLKRVVARNRQVVKIGVPGCTRITIDGILSVLRDLKSAGKLQVKHLQLRGLFGVTKDHYDELIDLLNIDNKVKQTIQKPRFYHRGEACVSCDDDRALDIEMCPKCQNFKLVYDCPAEDCKGKKKGSEECRACSLCIQRCYHCGRCIIDTEYEEMFCLELLCAVCSKPTPKLTL

SEQ ID NO: 4605 - protein, 322 aa, Arabidopsis thaliana
MGSIALQSWSRGASTSLHLLFRPVGSNPKLYDARRVQVRFFNVAASWSEQMISYTIVCLFCLLGFKFDVRASSSRKSLKKLKRESQQGKDIGLRNVTDEEVSSPRFEEAQVDSSTSKDSIDVFVAAPRDKVLQACTVTSGLMAALGLIIRKASHVASTEGLLVPDCSIDVPFGFETWHLGLIAGIVVFISSSRFLLLKSWPDFADSSEAANRQILTSLEPLDYLVVAMLPGISEELLFRGALMPLFGTNWNGIVAVGLIFGLLHLGSGRKYSFAVWASIVGIVYGYAAVLSSSLIVPMASHALNNLVGGLLWRYSSKIKSLE

SEQ ID NO: 4606 - protein, 532 aa, Arabidopsis thaliana
MDATSGTPSLQYINLPEQSVSTTSPPVSPFQRPKRHCFGDTTPGEFPLAANPSIVLHVLTECRLDPRDLANLEATCSFFSQPANFAPDINLSLSELAALDMCNKRVIFKPMNEEERQEMKRRCGGSWKLVLRFLLAGEACCRREKSQAVAGPGHSVAVTSKGEVYTFGYNNSGQLGHGHTEDEARIQPVRSLQGVRIIQAAAGAARTMLISDDGKVYACGKESFGEAEYGGQGTKPVTTPQLVTSLKNIFVVQAAIGNYFTAVLSREGKVYTFSWGNDGRLGHQTEAADVEPRPLLGPLENVPVVQIAAGYCYLLALACQPNGMSVYSVGCGLGGKLGHGSRTDEKYPRVIEQFQILNLQPRVVAAGAWHAAVVGQDGRVCTWGWGRYGCLGHGNEECESVPKVVEGLSHVKAVHVATGDYTTFVVSDDGDVYSFGCGESASLGHHPSFDEQGNRHANVLSPTVVTSLKQVNERMVQISLTNSIYWNAHTFALTESGKLFAFGAGDQGQLGTELGKNQKERCVPEKVDIDLS

SEQ ID NO: 4607 - protein, 498 aa, Arabidopsis thaliana
MSILLYFIALLSLIIIKKIKDSNRNLPPSPLKLPVIGNLYQLRGLFHKCLHDLSKKHGPVLLLRLGFLDMVVISSTEAAEEALKVHDLECCTRPITNVTSKLWRDGQDIGLAPYGESLRELRKLSFLKFFSTTKVRSFRYIREEENDLMVKKLKEAALKKSSVDLSQTLFGLVGSIIFRSAFGQRFDEGNHVNAEKIEDLMFEVQKLGALSNSDLFPGGLGWFVDFVSGHNKKLHKVFVEVDTLLNHIIDDHLKNSIEEITHDRPDIIDSLLDMIRKQEQGDSFKLTIDNLKGIIQDIYLAGVDTSAITMIWAMAELVKNPRVMKKVQDEIRTCIGIKQNEKIEEDDVDKLQYLKLVVKETLRLHPAAPLLLPRETMSQIKIQGYNIPSKTILLVNVWSIGRDPKHWKNPEEFNPERFIDCPIDYKGNSFEMLPFGSGRRICPGIAFAIATVELGLLNLLYHFDWRLPEEDKDLDMEEAGDVTIIKKVPLKLVPVLHH

SEQ ID NO: 4608 - protein, 380 aa, Arabidopsis thaliana
METNLLLVKCVLLASCLIHPRACSPSCNFPAIFNFGDSNSDTGGLSASFGQAPYPNGQTFFHSPSGRFSDGRLIIDFIAEELGLPYLNAFLDSIGSNFSHGANFATAGSTVRPPNATIAQSGVSPISLDVQLVQFSDFITRSQLIRNRGGVFKKLLPKKEYFSQALYTFDIGQNDLTAGLKLNMTSDQIKAYIPDVHDQLSNVIRKVYSKGGRRFWIHNTAPLGCLPYVLDRFPVPASQIDNHGCAIPRNEIARYYNSELKRRVIELRKELSEAAFTYVDIYSIKLTLITQAKKLGFRYPLVACCGHGGKYNFNKLIKCGAKVMIKGKEIVLAKSCNDVSFRVSWDGIHFTETTNSWIFQQINDGAFSDPPLPVKSACTR

SEQ ID NO: 4609 - protein, 396 aa, Arabidopsis thaliana
MANRADNSMRCSNSKKPNDGMMLVISIFAGIVIGFLLGISFPTLSLTKMNFPSSILPSVATVYIENEKPEKSSKTSSQNESDASHHHKIWVPSNPRGAEMLPPSFVAAESDFYLRRLWGLPKDDLPVVKPKYLVAFTVSYEQRKNIDACVKKFSDNFTIVLFHYDGKTSEYDEFEWSKRAIHVSVPKQTKWWYAKRFLHPDIIAPYEYIFIWDEDLGVENFDAEEYIKIVNKHGLEISQPAVESRKSITWKITKRIPGIEVHKEVEEKPGRCNDPHLPPCAGFIEIMAPVFSREAWRCVWHMIQNDLVHGWGLDFALRKCVEPAHEKIGVVDSQWIIHQKIPSLGSQGTAQEGKTAFQGVRERCKREWTMFQKRMTRSEQKYLKEIASASSNSTRT

SEQ ID NO: 4610 - protein, 202 aa, Arabidopsis thaliana
MSNLSARTGRDHQRYDNNFRLVSGCIPYRLVKDEEEDSTSVDFENKLQVLMISSPNRHDLVFPKGGWEDDETVLEAASREAMEEAGVKGILREDPLGVWEFRSKSSSVEADCCLGGGCKGYMFALEVKEELAIWPEQDDRERRWLNVKEALELCRYEWMQSALEEFLRVMAEEGSTKEDSLAISSISNRGERQIDPRYCFVV

SEQ ID NO: 4611 - protein, 494 aa, Arabidopsis thaliana
MGLDGNNGGGVWLNGGGGEREENEEGSWGRNQEDGSSQFKPMLEGDWFSSNQPHPQDLQMLQNQPDFRYFGGFPFNPNDNLLLQHSIDSSSSCSPSQAFSLDPSQQNQFLSTNNNKGCLLNVPSSANPFDNAFEFGSESGFLNQIHAPISMGFGSLTQLGNRDLSSVPDFLSARSLLAPESNNNNTMLCGGFTAPLELEGFGSPANGGFVGNRAKVLKPLEVLASSGAQPTLFQKRAAMRQSSGSKMGNSESSGMRRFSDDGDMDETGIEVSGLNYESDEINESGKAAESVQIGGGGKGKKKGMPAKNLMAERRRRKKLNDRLYMLRSVVPKISKMDRASILGDAIDYLKELLQRINDLHNELESTPPGSLPPTSSSFHPLTPTPQTLSCRVKEELCPSSLPSPKGQQARVEVRLREGRAVNIHMFCGRRPGLLLATMKALDNLGLDVQQAVISCFNGFALDVFRAEQCQEGQEILPDQIKAVLFDTAGYAGMI

SEQ ID NO: 4612 - protein, 649 aa, Arabidopsis thaliana
MGLPQTASSEQSQEALSTPSCSLSQSLPVYATSHDSDVLNSGSEEGICSSIAEFDRKTSLEPLEFTDDSCRFRGTCVVTSSSAHGSTSYAAGKVSSSLTGARRIVGFASGETSSLDNKQTSVAVDHSLSSTVGVAGVDIGGALVRKRVLSPLNTLFPVKFRGDLHDISCGNHQQITYSGQSNGFCNSVAQDHIKANTPSRLHLSTTPTTTSCWEWKNVSNSGRLSSMVFTDGPLLDSVDLRQPVKGGEVCLYSPLYETSSTPNKPLPCDKEISVSPPLCLSPLGPKFSERVKAVRSCQTGKILEDLRNISEEAELRVDRRLFDDAYAIRRAFSMERSTESAPASPCKRFIRSLSGRPIQRSLVGSFEESLLTGRLSCGPTNQKIDGFLAVLSIAGGNISPKSQKLPFSVTSAGDDCLLLYYASIDLAGGSKLNKFWGQKVKTSQMNSDAQSSKSQLRIPMKGRIQLVLSNPEKTPLHTFLCNYDLTDMPAGTKTFLRQKVTLGSSNPTSEATQENTRKATSLEKENSKHGDKESCEGSDSVDSVEGDVLHESGKICLKPSKECNGGSGALRYALHLRFLCPLPKKSSKKSEETESTGQKKNLDSDGKRRFYLYNDLRVVFPQRHTDSDEGKLNVEYHYPENPRYFDITE

SEQ ID NO: 4613 - protein, 614 aa, Arabidopsis thaliana
MKASIEKLRRLTSHSHKVDVKEKGDVMATTQIDELDRAGKDMQDMRECYDRLLAAAAATANSAYEFSESLGEMGSCLEQIAPHNDEESSRILFMLGKVQSELQRLLDTYRSHIFETITSPSEALLKDLRYVEDMKQQCDGKRNVYEMSLVKEKGRPKSSKGERHIPPESRPAYSEFHDEATMCIFRLKSLKEGQARSLLIQAVRHHTAQMRLFHTGLKSLEAVERHVKVAVEKQHIDCDLSVHGNEMEASEDDDDDGRYMNREGELSFDYRTNEQKVEASSLSTPWATKMDDTDLSFPRPSTTRPAAVNADHREEYPVSTRDKYLSSHSAPLFPEKKPDVSERLRQANPSFNAYVLPTPNDSRYSKPVSQALNPRPTNHSAGNIWHSSPLEPIKSGKDGKDAESNSFYGRLPRPSTTDTHHHQQQAAGRHAFSGPLRPSSTKPITMADSYSGAFCPLPTPPVLQSHPHSSSSPRVSPTASPPPASSPRLNELHELPRPPGHFAPPPRRAKSPGLVGHSAPLTAWNQERSTVTVAVPSATNIVASPLPVPPLVVPRSYSIPSRNQRVVSQRLVERRDDIVASPPLTPMSLSRPLPQATGVAQTSQIRGVGKLIER

SEQ ID NO: 4614 - protein, 340 aa, Arabidopsis thaliana
MNFGCDPRIMDFEILIGIAFGRQLRKLVLKVYSGDWFKFPTSLYNSETLETLELYHCILIDVPFPVCLKSLRTLNLHEVEFVNDESVVNLLAGCISLENLVIHQTTDLNVKTFTIAVPSLQRLTVIVEYYEEFSVFVVNTPSLKYLKIEGIIVDDRTCIIENTPELVEASIIDVSFKVFESILGSLASVQRLSLKVSLVEIFSLPPISNTFYHLTYLELSTYKPKWWNLLTLMLDTSPNLQVLKIFDFMTSQEQRPWEKWNEPKNVPECLLLHLETFVWTCYEGKLENEIELAKYILRNARRLKKATFSIIEINPDKRVEMVGELKSVVRASNSCQLVFI

SEQ ID NO: 4615 - protein, 813 aa, Arabidopsis thaliana
MVESAAFPGGYYRNTFEAPEESEGSGSSAQIDTEVTASENSSTPARKCIMLNSNDEDPYGVQRQVISLYNMSQSERKDLIYRLKLELEQTKIVLKNAELQRMNPAAVSSTSDRVGFSTGQKISSRVSNSKKPSDFAVGSGKKVRHQNGTSRGWNRGTSGKFESSKETMTSTPNITLMKQCDTLLRKLWSHPHSWVFQAPVDVVKLNIPDYLTTIKHPMDLGTVKKNLASGVYSSPHEFAADVRLTFTNAMTYNPPGHDVHIMGDILSKLFEARWKTIKKKLPPCSMQTLPAVTLEPNDERKAAISVPPAKKRKMASPVRESVPEPVKPLMTEVERHRLGRQLESLLDELPAHIIDFLKKHNSNGGEIAEDEIEIDIDVLSDEVLVTLRNLLDEYIQNKEAKQTNVEPCEIELINGSRPSNSSLQRGNEMADEYVDGNEPPISRSSSDSDSGSSEDQSDDAKPMVQGDSSKMPETANSEAQRDENTRIDDLFVGSQSTGALEQMDICSQQKLSSDESDGQHEGNILETPASSEKRYRAALLKNRFADIILKAREKPLPQNGIKGDPERLRKEREELVLQKKKEKARLQAEAEAAEDARRQAEAEAAAEAAAEAKRKRELEREAARQALLKMEKTVEINENSRFLEDLEMLSSSAPEQLPSSAEETSPERPLDALGSFNLRGSNPLEQLGLYMKQDDDEEEPEAPAVPKPDETSTERPLDALGSFKLGECNPLEQLGLYMKQDDGEEEEPEAPVVPKPNETSLERPVDAFGSFNLKGSNPLEQLGLYMKQDDDEEEPEAPAVPNLANDVEEGEID

SEQ ID NO: 4616 - protein, 913 aa, Arabidopsis thaliana
MKVRRKLGGGCGGDVVVSWRTFFWFVILFVFSFVLFSTMFIFKGKFRPVVRSTISFSTAVTARAVFRESISSSPAVTIREAVKLPEQTLVFLKYPQSRRLFTKDDLICVFSGSSKLRKVYPTAVDRDKFGGQIVRCPETPRGYTISLAVSRWTTDDHLPAGPTHRYDWLVYDAVIDYDNSTVVFVKGLNLRPGRVADVSRYECVYGWDFAKHNRLIRSDVITAAQEIVRCRTPLAVLDGPKAARGPVKVSVRIKGGTGMLPSIAQPVRIINPPRKKPFQMCVCTMTRNAAAVLREWVMYHAGIGVQRWFIYDNNSDDDIIAEIENLERRGYNISRHFWPWIKTQEAGFSNCAIRAKSDCDWIAFIDVDEFFYIPSGETLTSVIRNYTTTDSIGEIRTPCHSFGPSGLRSRPRSGVTSGYTCRVVLPERHKSIIRPEAMNATLINVVHHFHLRDGFTFADMDKDIMVINHYKYQVWEVFKEKFYRRVATYVADWQNEENVGSRDRAPGLGTRPVEPSDWAERFCEVNDTGLRDQVFEKFKDKKTQRLVWEKAEEDDNIQRMVSETPLRVTNRSGDGSNGSKEVSIAREKNGENAEIFISPRFKSAAAMAGWDEEDLIIASFVVDDTPERSSSKRRRRSNLLFKSTPPSGSSRRNQRVKQSLVPLPVIDLDKVIRHEEEKSAEKKKKKREMETETKEEKKIDKDEKSLSDHVVLPCIDKLRDELSCAICLEICFEPSTTTCGHSFCKKCLRSAADKCGRKCPKCRQLIGNGRYCTVNTVLWNTIQLLFPKEVEAQRAASANLKGKETPSPRNPNQRLRSRNRETALFQERLQREDISRLLVSEERSERSERRRRSTSMRLDQNRDAALAMRLQRQEFASAFGATTAETSSSSVSTLSRARANLQAMASRAVRRQG

SEQ ID NO: 4617 - protein, 319 aa, Arabidopsis thaliana
MGESAVLVHSYSFAAPITRNDSHEENTIHALSQSISFGKFMTENLEWGKWSSFSHKKYVEEAEKYSRPGSVAQKKAFFEAHYKRIAEAKKAATEEQPSVTPAEVLLHTLETQPPPPPPPLVLKYGEEGRERNSFQIDDHDVTDELENVMFGGDYVKEEEEKKVEEELLKEDWSVGEKEKQHRKSVTKNRPVFRLSLEKTIPPKSLDEISLTEKRSERPMTQVEEKPVHRQRFGLLSCFISNAKTQDQNQSRNKRKTEKKKQFLCLCLKPKTIREWHRLCSIHTSLEKSPSAIGISFFCLVLFESLLSVLLCNERTTPVS

SEQ ID NO: 4618 - protein, 440 aa, Arabidopsis thaliana
MPKLISFVCDACGTKGDRSPYICVQCDFMIFHQKCARLPQVINVNHHDHRVSFKYPLGPGEWRCGVCWEEIDWSYGAYSCSVCPRYAIHSLCATRRDVWDGKELNRVPEKVEYIEPFKRNDDNTITHFAHEHNLTSLGQGGEESSLCGGCVCPIGSCTFYKCLESKCSFILHETCANLRKKKRHFLSPQPLTLCLESYLLPYSCEACHQVFFHGFSYSTYLRKSLDIFCSSITVPLIHGSHDHHLLYLKQRFGDVKTCQSCGMDETEVVIGCMKCDYFLDFRCATLPLTVTLPRYDDHPLTLCYGEEKASGKYWCDICERETNPKTWFYTCKDCGITLHVFCVVGDIIYAKEGKHIIYDDNSLLSNNSSSRPLCHNCHCRCPGSFILRAEKWGYSEKRREVKFFCSYYCFIISGYAEREVSKIKLRSPPWTIGNQIQLME

SEQ ID NO: 4619 - protein, 356 aa, Arabidopsis thaliana
MGSASGFYSNEEFELDPKWLVDPRHLFVGPKIGEGAHAKVYEGKYRNQTVAIKIIKRGESPEEIAKRDNRFAREIAMLSKVQHKNLVKFIGACKEPMMVIVTELLLGGTLRKYLVSLRPKRLDIRLAVGFALDIARAMECLHSHGIIHRDLKPENLILSADHKTVKLADFGLAREESLTEMMTAETGTYRWMAPELYSTVTLRQGEKKHYNHKVDAYSFAIVLWELILNKLPFEGMSNLQAAYAAAFKNLRPSAEDLPGDLEMIVTSCWKEDPNERPNFTEIIQMLLRYLTTVSAPQIIPPPNRRVFSSENIVLSPESPGTCSLMSVRDGDVSRQTVNTADSSEKQTKGSFFSCCS

SEQ ID NO: 4620 - protein, 153 aa, Arabidopsis thaliana
MNANPCEVCRFQNKQCVNNCMFALLFPSSDLEKFDVVNRIFGLETLTFYLKDLSPMERIDTTRTLYYEAKPCFLNPPKNPSKFLEALLNYPYQKAEEVSKTKKLLASYSRPCVVLALPAPKYTQSKSKPSVLRKRKRKTKSSDESAIRVVEDS

SEQ ID NO: 4621 - protein, 476 aa, Arabidopsis thaliana
MATKLESFKVVEKLGVEKGEKGKMMSKKKNVKKDGDESESGFWFRFKFIFSCISSRSKVDSSMNATAVIAEPKKVIEKLEGHPAPTKDTGCAESGSSTPLMSGELKYSSKLRIFMFNDLKLATRNFRPESLLGEGGFGCVFKGWIEENGTAPVKPGTGLTVAVKTLNPDGLQGHKEWLAEINFLGNLVHPSLVKLVGYCMEEDQRLLVYEFMPRGSLENHLFRRTLPLPWSVRMKIALGAAKGLAFLHEEAEKPVIYRDFKTSNILLDGEYNAKLSDFGLAKDAPDEKKSHVSTRVMGTYGYAAPEYVMTGHLTTKSDVYSFGVVLLEILTGRRSVDKSRPNGEQNLVEWVRPHLLDKKRFYRLLDPRLEGHYSIKGAQKATQVAAQCLNRDSKARPKMSEVVEALKPLPNLKDFASSSSSFQTMQPVAKNGVRTQGGGFVSRNGPPMRSLSSLNLPQASPYRYARQSPKPKGKEP

SEQ ID NO: 4622 - protein, 312 aa, Arabidopsis thaliana
MLEVRSMDMTPKSPEPESETPTRIQPAKPISFSNGIIKRHHHHHHNNNKVTYKECLKNHAAAIGGHALDGCGEFMPSPSSTPSDPTSLKCAACGCHRNFHRRETDDSSAVPPPSLLPSSTTTAAIEYQPHHRHHPPPPLAPPLPRSPNSSSPPPISSSYMLLALSGNNKTAPFSDLNFAAAANHLSATPGSRKRFRTKFSSNQKEKMHEFADRIGWKIQKRDEDEVRDFCREIGVDKGVLKVWMHNNKNSFKFSGGGATTVQRNDNGIGGENSNDDGVRGLANDGDGGGGRFESDSGGADGGGNVNASSSSS

SEQ ID NO: 4623 - protein, 168 aa, Arabidopsis thaliana
MSKSDITESSLIHKVDMYEKVRVFEYEVDMYEKVRVFETPLEQVHKKCQMEETIRAASQEVSNEFKTLVKVEDLNSLRHLQHLILGRLQDSNAVLSHYNEFAENCFSDVSLEFARSTRLLKSMKADLDYIFLKLRSIKSKILATYPDAFPDDSTSDAFDRRPDLELPQ

SEQ ID NO: 4624 - protein, 109 aa, Arabidopsis thaliana
MLSNEARPSNLGGWNRCPWGHLAHARQAHSPRRFSSFCPRTAEKTRKKATKPIAGKVAGKVFRRKSRRPDGRSFLVSISDTIPRSLPKSEPIKGVPTDCPDSLNTHPPI

SEQ ID NO: 4625 - protein, 100 aa, Arabidopsis thaliana
MGSQKNVKHLEECTVSNALGTWVFSVLGALVAIPVGIKRKSLGPLVFFGTTGTMLDIIIGVSQCEREHAEHQTKLLQDSQNATTTTTTTNTETEDSSSMS

SEQ ID NO: 4626 - protein, 747 aa, Arabidopsis thaliana
MFHGQGFSRNRCNVVAVVSGAELCDTNNQIDGTSHQPKYPFPDLSSSGRLKFQVLNNPTPEEFQVAVNSSATDFVYLQGEHSGDSDEVGPLVLGYTDFSTPDALVTLFGSTLPTTVYLELPNGEELAQALYSKGVQYVIYWKNVFSKYAACHFRHSLFSVIQSSCSDTWDVFHVAEASFRLYCTSDNAVLPSNSNRKMNYEMGPCLLGEPPKIDVVSPEADELEEENSLESLPSIKIYDEDVTVRFLLCGPPCTVDTFLLGSLMDGLNALLRIEMRGSKLHNRSSAPAPPLQAGTFTRGVVTMRCDVSTCSSAHISMLVSGNAQTCFSDQLLENHIKHEVVEKIQLVHSVVNSEETKRGFSEPRRSASIACGASVCEVSMQVPTWALQVLRQLAPDVSYRSLVVLGVASIQGLSVASFEKDDAERLLFFCGQQINDTSNHDALLSKIPNWLTPPLPTRKRSEPCRESKEIENGGPTSRKINVAALRPIPHTRRHKMIPFSGYSEIGRFDGDHTKGSLPMPPKHGASGGTPVTHRKAFSGSYQRKQIISLNPLPLKKHDCGRAHIQVCSEEEFLRDVMQFLLIRGHTRLVPPGGLAEFPDAVLNSKRLDLFNLYREVVSRGGFHVGNGINWKGQVFSKMRNHTLTNRMTGVGNTLKRHYETYLLEYEYAHDDVDGECCLICRSSTAGDWVNCGSCGEWAHFGCDRRPGLGAFKDYAKTDGLEYVCPNCSVSNYRKKSQKTSNGGLLVP

SEQ ID NO: 4627 - protein, 244 aa, Arabidopsis thaliana
MWLILSSGVCSISLLSKSTVTSPDYLIKDCAVKSNVLSFWRQCGRTTCLRIIAPDTKNTLTRHFCEGLVLLQWEEISLCCCSNWSTFRNEISHRQGLLRVCEFTLAEIEHFVDPGNKSHPKFSDVANFEFLMFPREEQMSGQSAKKLCLGEVVAKGTVNKETVGYFIARVYLFLVRLGTDKEQLRFRQHFANEMARYAADCLDAEFESSYGWIECVGIADRSAFDLRAHSVGKVALWLREISRT

SEQ ID NO: 4628 - protein, 717 aa, Arabidopsis thaliana
MMTEATKVLYIVVREEGDDDDNNGDDSFRYTRPVLQSTLQLMGCKARHAFKISRRVFELIRSEGSCNTSPENGKEPEFAKEVGGSTCVEKLNCLVVAGDVDKNKSKPFEMYKRRTTVVVSREIFVDVVCDALAEYKYVGRDQRADLILACRIRERKESVTVLLCGTSGCGKSTLSALLGSRLGITTVVSTDSIRHMMRSFADEKQNPLLWASTYHAGEYLDPVAVAESKAKRKAKKLKGSRGVNSNAQKTDAGSNSSTTELLSHKQMAIEGYKAQSEMVIDSLDRLITTWEERNESVVVEGVHLSLNFVMGLMKKHPSIVPFMVYIANEEKHLERFAVRAKYMTLDPAKNKYVKYIRNIRTIQDYLCKRADKHLVPKINNTNVDKSVATIHATVFGCLRRRETGEKLYDTTTNTVSVIDDEHRNQCAANSLTSKGMFQVIQRQGSSRRFMALCNTDGTVAKTWPVASVGKIRKPVVNTEMDDGTEHQLHKAEPVNLQFGHFGISAWPSDGATSHAGSVDDLRADIIETGSRHYSSCCSSPRTSDGPSKELMEEQSVNGSDEDDEEGDDDFHEPDSDEDLSDNNDERNRDEIGSVDEESTKSDEEYDDLAMEDKSYWTDNEEEESRDTISMVSQNNHNEASKTNKDDKYSQNLDLFLKTTNQPLTESLELTSEYRNRMGVAASDKAKMRKRSLSIPPVGKHGSIIDDQILANQTDSVL

SEQ ID NO: 4629 - protein, 396 aa, Arabidopsis thaliana
MFCDSFAFAQVMSCFGCFGGSERSRHSPNPYDDDTYSHDSGETSNPGGDDEEGEEEEEVEELSRSKRSEEILKCKLQNGLVCRQFPVKETNKLTRGEDEDGNKTINEFVRERKIGSGSYGKVVLYRSTVDDKHYAIKAFHKSHLSRLRVAPSETAMGDVLREVMIMKTLEHPNIVNLIEVIDDPEFDDFYMVLEYVDGKWAYDDSGPPGALGEITARKYLRDVVAGLMYLHAHNVIHGDIKPDNLLVTSTGRVKIGDFSVSQVFKDDDDQLRRSPGTPVFTAPECCLGITYSGRSADTWAVGVTLYCMILGQYPFLGDTLQDTYDKIVHNPLIIPEGLNPRLRDLIEGLLCKDPNQRMTLKAVAEHPWITGEDGAISEYCCWCKRKAEEEEDQNHS

SEQ ID NO: 4630 - protein, 385 aa, Arabidopsis thaliana
MESTVEREAWKAHVAMIGVQLFNGGYHVITKVALNVGVNQLVFCVFRDLIALSILAPLAYIRDKRTRPPLNRQFLLAFFFLGLTGIFGNQLLFLIGLNYTNPTYAAAIQPSIPVFTFILALIMGTERLNLFKLEGQAKVGGTLICVAGAVLMVLFRGLALFGETEAESLGHGESRHTETSGHFMSGFFNGLGRWNLGVLCLIGNCTCMAAFLAIQAPVLKKYPANLSVTAYSYFFGTMFMVTSAFFMTNESTNWSLTRSEFFAVVYAGVIASALNYGLLTWSNKILGPSLVALYNPLQPAASAFLSRIFLGSPIYLGSILGGCAIIAGLYSVTWASYKEKKAAAAMAVIPITSKEAEPLIYKDHKNKPIGHLFTKSPISSPKSDD

SEQ ID NO: 4631 - protein, 263 aa, Arabidopsis thaliana
MRSFLYLIVVIFLFSSSVNACDRCLHRSKASYFSSASALSSGACAYGPMATSFFAGHIAAAIPSIYKDGAGCGACFQVRCKNPKLCNSKGTIVMVTDLNTSNQTDLVLSSRAFRAMAKPVVGVDKYLLKQGIVDVEYQRVPCNYGKRNLNVRVEEASKKPNYLAIKLLYQGGQTEVVGIDIAPVGSSQWSYMSRSHGAVWATDKVPTGALQFKFTVTGGYDGKTVWSKRVLPANWNSGRIYDAGVQITDIAQEGCDTCGHIWN

SEQ ID NO: 4632 - protein, 553 aa, Arabidopsis thaliana
MVSHKVLEFGDDGYKLPAQARAPRSLRKKRIYEKKIPGDDKMCAIDLLATVAGSLLLESKSPVNACLVVQNTVKNEYPADENPVKAVPYSESPSLFDNGKCGFSSVITNPNHLLVGDKVGKEVEGFSSLGVSGDVKPDVVASIGSNSSTEVGACGNGSPNESRDDVNLFSRNDDDENFSGYIRTRMTRPVPRIGDRRIRKILASRHWKGGSKNNTDAKPWYCSKRSYYLHHHQRSYPIKKRKYFDSVYDSNSDDYRLQGKTHKGSRTISSMKSRNASFVSRDHHVKLRIKSFRVPELFVEIPETATVGSLKRMVMEAVTTILGDGLRVGLMVQGKKVRDDGKTLLQTGISEENNHLDSLGFSLEPSLETTPQPLLSSYLSDHACDDVTLCHDNALDSSHEPEPSPADSFGKLGTSDHSRALIPVASAAMLAPRPPNRKFKRTEQQLAAQRRIRRPFSVTEVEALVQAVEKLGTGRWRDVKVRAFEDADHRTYVDLKDKWKTLVHTARISPQQRRGEPVPQELLDRVLKAHAYWSQHLMHQLQTEPPSTQVEAL

SEQ ID NO: 4633 - protein, 480 aa, Arabidopsis thaliana
MCRVGGVIQKTFRRFFGDVLFVGICQSTQQLTGLSCGSVVGTEVQRNPVTNKKRSVSPLPHMALSDAFIEAKSDIKRFSTPHPRRVEPEKGMKAKSSSRKDSSEKKSVNLRSLSHSGPIRDLSTQKVKERGKSKIDKKSSKSVDYRGSKVSSAGVLEECLIDVSKLSYGDRFAHGKYSQIYHGEYEGKAVALKIITAPEDSDDIFLGARLEKEFIVEATLLSRLSHPNVVKFVGVNTGNCIITEYVPRGSLRSYLHKLEQKSLPLEQLIDFGLDIAKGMEYIHSREIVHQDLKPENVLIDNDFHLKIADFGIACEEEYCDVLGDNIGTYRWMAPEVLKRIPHGRKCDVYSFGLLLWEMVAGALPYEEMKFAEQIAYAVIYKKIRPVIPTDCPAAMKELIERCWSSQTDKRPEFWQIVKVLEHFKKSLTSEGKLNLLPSQICPELKKCPKFWIHIFGSFHHHSSGGGSSSNNSALPKPKFA

SEQ ID NO: 4634 - protein, 599 aa, Arabidopsis thaliana
MALSFRISSSSPLICRATLSNGDNSRNYHTTDAAFIRRAADLSEMSAGLTSPHPNFGCVIATSSGKVAGEGYLYAQGTKPAEALAVEAAGEFSRGATAYLNMEPGDCHGDHTAVSALVQAGIERVVVGIRHPLQHLRGSAIRELRSHGIEVNVLGEDFESKVLEDARKSCLLVNAPLIHRACSRVPFSVLKYAMTLDGKIAASSGHAAWISSKLSRTRVFELRGGSDAVIVGGNTVRQDDPRLTARHGQGHTPTRIVMTQSLDLPEKANLWDVSEVSTIVVTQRGARKSFQKLLASKGVEVVEFDMLNPREVMEYFHLRGYLSILWECGGTLAASAISSSVIHKVVAFVAPKIIGGSKAPSPVGDLGMVEMTQALNLIDVCYEQVGPDMLVSGFLQPIPDLLPVIPSEDATVEIDPSVDPFEPSIIFFYKTWDLYGMWNITIRYHTTVHVKWYLALSKKHNLLILHPKTLKANKFVGVENPKAYDCVEKIRTARSPEEAALIGRSTLRQKPELVRNDWEDVKIEVMYKALKCKFSTYPHLKSMLLSTIGTVLVEASPHDLFWGGGREGEGLNYLGRLLMQLRSEYLGESSVSAEKTSSA

SEQ ID NO: 4635 - protein, 288 aa, Arabidopsis thaliana
MADHLSLCTDRLITSESLDSEKDSDSSGESSYRPQGTDLASSSVNETEVPREYYAVADEEEPLLQSVECRICQEEDSTKNLEAPCACNGSLKYAHRKCVQRWCNEKGDITCEICHQPYQHGYTAPPPPPPDETIIHIGDDWENGVPLDLTDPRILAMAAAERHFLEADYDEYSENNSSGAAFCRSAALILMALLLLRDALNLTTNPDDEDDPTAFFSLFLLRAAGFLLPCYIMAWAIGILQRRRQRQEAAALAAAEVTFMIHGGGPQRRGLHFAVAPQPPISNVPTPV

SEQ ID NO: 4636 - protein, 302 aa, Arabidopsis thaliana
MDPYSHGSSFMNLLTSQQEAHNLETNPYDDDVSPNQAAHTPKVKRERRKWSAGEDLVLVSAWLNTSKDAVIGNEQKGYAFWSRIAAYYGASPKLNGVEKRETGHIKQRWTKINEGVGKFVGSYEAATKQKSSGQNDDDVVALAHEIYNSEHGKFTLEHAWRVLRFEQKWLSAPSTKATVMSKRRKSDKASTSQPQTHEAEEAMSRPIGVKAAKAKAKKAVSKTTTVEDKGNVMLEIQSIWEIKQKDWELRQKDREQEKEDFEKQERLSRTKLLESLFTKKEPLTDIEVALKNKLINEMLSNS

SEQ ID NO: 4637 - protein, 44 aa, Arabidopsis thaliana
MWLSHELLPRGLGRIEMVPTSIVEETKCFKCMYCCEFYRLMSLV

SEQ ID NO: 4638 - protein, 1611 aa, Arabidopsis thaliana
MHGRVCERRHKSRRRHMLISSSRVIATVEGGGSSCLSLSSSTSFSKDGRKISVGDCALFKPPQDCPPFIGIIRLIIAEEEDKLKLGVNWLYRPTELKLGKGILLEAEPNELFYSFHEDNIPAASLLHPCKVAFLPRGVELPSGISSFVCRRVYDVTNERLWWLTDQDYIDDRQLEVDKLLCKTRSEMHTTLQQGGRSPKSMNSPTTSQPKDGIQNNNSLFSQSKGRKRERMDHGSESVKRERSSRVDDSGSGPLRTESGLTSEILKFTEKGGLVDSEGVEKLVQLMLPERNEKKIDLVGRAILAGFVAATNRFDCLSRFVQLRGLPVFDEWLQEVHKGKVGDGGSPKDSDRLVDDFLLVLLRALDKLPVNLNALQTCNIGKSVNHLRSHKNSEIGKKARSLVDTWKKRVEAEMDAKSGSNQGVSWPGRLSHGGRHSGGSAEANKTSSSHLHASKSVSVKQQVENNLKCVATSPGSTRSAPSPGSGGNVSKDGQQRNAGAGGVSEVLAAVKDEKSSSSSQSHNNSQSCSSEHAKTGNLCGKEDARSSTAGSTLKKCSGGSSRHRKSNNVFQGSSSSASPRGAGLSRSFSSHRNVPSEKISQSSLTSEKTLEVPLTEGSGNKLIVKLPRGRSPAQSVSGGSLEDPAPVNSRVSSPVHTVKQELCDNNWREKNHSYRADVSSVLNAESWQSNELKDILTGSQEATGSPLVVAGDEREGALKDSDKASGNVKATSSLGNEFKSGERHGGTLSSMNALIESCVRYSETNASLAGSDDVGMNLLASVAADEMSKSPVASPSVSQPPNSLMNENSTVGNNTKLMASDGLPHKQHQAVRPTLSNEQGEQHVSSSGTQLESEIKNESKTGDRVKSSNSDTEDLQRFVDQRLESNENSDGVVASPPLPTKVIKENILDDSDSGEVKDIKTDVKSEADCTSDLTKRVASSMLTECRDVSKMVDSVAVEHTPLEGVDDDKKEEKPPTALSSELVKKVEEDVPVSSGISRGMDAVSIDRPITEMVNNIAFNHMDQKDIKKIKQDFDTSVGAVKDASAGLDSSVTKGKVEPVEGNLENIEIMERYSGLRATPGLSPKEAEDLKRPNAPKTSDADGDEAGECTSAARDASSVSAAASASAGSEMDARVEFDLNEGFDGDDAQHGDSNNFSGSVVLTPTPLQPVNTLPFPVAPVSSGIPASITVAAAVKGPFVPPEDLLRYKGAVGWRGSAATSAFRPAEPRKAQDVLLSINNTSTSDASTSAGKQTRTFLDFDLNVPDERVLEDLASQRSGNPTNCTSGITNNFDQVRSGVMGSALDHSSGGLDLNKVDDLTDMNSYTMNSSHRLDSSFQQVKLPSTGGRRDFDLNDGPVGDDAAVEPSMVLNQHSRSGLPSQPSLSGIRVNGENMASFSTWFPAANAYSAVSMPPIMPERGDQPFPMIATRGPQRMLGPTTGVSSFSPEGYRGPVLSSSPAMPFQSTTFQYPVFPFGNSFPVTPANFPGASTAHMDSSSSGRAYFPGVNSQILGPGVPVPSNYPRPYIVGLPNGGSNGGVLDNSAKWFRSGLDLNSGPGGHETEGRDESTLVSRQLSSSASVPSKEDQARMYQMSGGVLKRKEPEGGWDGYRQSL

SEQ ID NO: 4639 - protein, 477 aa, Arabidopsis thaliana
MSILCGCCPLLECVYCLGCARWGYKRCLYTAGHDSEDWGLATTDEFEPVPRFCRYILAVYEDDIRNPLWEPPEGYGINPDWLLLKKTYEDTQGRAPAYILYLDHVHQDIVVAIRGLNLAKESDYAMLLDNKLGERKFDGGYVHNGLVKSAGYVLDEECKVLKELVKKYPSYTLTFAGHSLGSGVATMLALLVVRHPERLGNIDRKRVRCFAIAPARCMSLNLAVRYADVINSVILQDDFLPRTATPLEDIFKSVFCLPCLLCIRCMKDTCVPEQKMLKDPRRLYAPGRMYHIVERKPCRLGRYPPVVKTAVPVDGRFEHIVLSCNATSDHAIIWIEREAQRALNLMMENEKKMEIPEKQRMERQESLAREHNLEYRAALRRAVTLDVPHAESMAYEYGTFDKTQEDETEEEEVETEEEEEDTDSIAPMVGESSSSSSVKPTYRIRRNRRVSWDELIEHLFERDESGNLTFEKSDLPQ

SEQ ID NO: 4640 - protein, 312 aa, Arabidopsis thaliana
MPASHEASNYDEVSMQQSMLFSDGLQDLKNLRAQLYSAAEYFELSYTTDDKKQIVVETLKDYAVKALVNTVDHLGSVTYKVNDFIDEKVDEVSETELRVSCIEQRLRMCQEYMDHEGRSQQSLVIDTPKFHKRYILPAGEIMTATNLEKLKYFGSSLEDADDWNQFRNAVRATIRETPPPPVRKSTSQSSSPRQPPQRSATFSFTSTIPKKEQDKRSVSPHRFPLLRSGSVATRKSASISRPTTPSKSRSITPIRYPSEPRRSASVRVAFEKDNQKETEQQQPSKSKRLLKALLSRRKTKKDDTLYTFLDEY

SEQ ID NO: 4641 - protein, 300 aa, Arabidopsis thaliana
MSGRFSRSIYVGNLPGDIREHEIEDIFYKYGRIVDIELKVPPRPPCYCFVEFEHSRDAEDAIKGRDGYNLDGCRLRVELAHGGRGQSSSDRRGGYGGGGSGYGGGGGGGGSARFGVSRHSEFRVIVRGLPSSASWQDLKDHMRKAGDVCFAEVTRDSDGTYGVVDYTNYDDMKYAIRKLDDTEFRNPWARGFIRVKKYESSRSRSRSPSRSRSRSRSRSRSRGRGRSHSRSRSLSRSKSPRKDLSKSPRRSLSRSISKSRSPSPDKKKSPPRAMSRSKSRSRSRSRSPSKSPPKVREGSV

SEQ ID NO: 4642 - protein, 310 aa, Arabidopsis thaliana
MGRAPCCDKANVKKGPWSPEEDAKLKSYIENSGTGGNWIALPQKIGLKRCGKSCRLRWLNYLRPNIKHGGFSEEEENIICSLYLTIGSRWSIIAAQLPGRTDNDIKNYWNTRLKKKLINKQRKELQEACMEQQEMMVMMKRQHQQQQIQTSFMMRQDQTMFTWPLHHHNVQVPALFMNQTNSFCDQEDVKPVLIKNMVKIEDQELEKTNPHHHQDSMTNAFDHLSFSQLLLDPNHNHLGSGEGFSMNSILSANTNSPLLNTSNDNQWFGNFQAETVNLFSGASTSTSADQSTISWEDISSLVYSDSKQFF

SEQ ID NO: 4643 - protein, 620 aa, Arabidopsis thaliana
MSVTTSFGIWLNHINLDNQASFLYNNPHFCNRRFNRISMLRTVSLARNRLRSETPSSFLARDRLRSKTPSSSPFSSKRHTPKTSEIEEESTPKDSVLLNPKDPSSAPKLFLVQPRLAPPKYLQAKLNEALCLANSLEEQRYGYFESDFFDKELPSHVVVQNPVRRSSKPRVDTYFGSGTVDNIKCHLNAEDSKEEVDAVFVNAILTAIQQRNLERIWAKPVLDRVGLIIEIFNAHAHTKEAKLQAELAALMYNKSRLVRVRGTDGRHTFGQFGEAEVVSARGRAGSKGTGGGFVGGAGETELQLQRRRISDRRIRLLSQIKEAQRTRLLQRAGRKKRVGLEGESSGTIAVVGYTNAGKSTLISALTKTALYCNERLFATLDPTLKSAHLPSGNFVLLSDTVGFISDLPIQLVKAFQSTLEEVVEADLLLHVVDSTAPNIEEHRSTVLHVLNQIGVPEEKLQNMIEVWNKIDYEEDEVEEEKYLDDGEGVGEEDEDEADLKAEETVDASEATVDEDQIQNGDGDDADGWLLSEDENADDPEFWKVPEVAKVDAANKKGPDVRVSALTGVGLKELLYLIDDKMKEKKLKSPTIVERSELHKRKWRPPRNDDEEERLIPLDQR

SEQ ID NO: 4644 - protein, 448 aa, Arabidopsis thaliana
MPMFQPLKRDGLIGFEGGGDGQVLDLDTAVKDGVLGGVNGGGVGVVDEKLDLKKMIKELDLQDIPSVFICPISLEPMQDPVTLCTGQTYERLNIHKWFNLGHLTCPTTMQELWDDTVTPNKTLHHLIYTWFSQKYVLMKKRSEDVQGRAIEILGTLKKAKGQARVHALSELKQIVIAHLMARKTVVEEGGVSVISSLLGPFTSHAVGSEVVAILVSLDLDSDSKSGLMQPAKVSLIVDMLNDGSNETKINCARLIRGLVEEKGFRAELVSSHSLLVGLMRLVKDKRHRNGVSPALRLLKPISVHKQVRSLMVSIGAVPQLVDILPSLDPECLELALFVLDALCTDVEGRVAVKDSANTIPYTVRVLMRVSENCTNYALSILWSVCKLAPEECSPLAVEVGLAAKLLLVIQSGCDAALKQRSAELLKLCSLHYSDTMFISKCKLTRTIQ

SEQ ID NO: 4645 - protein, 124 aa, Arabidopsis thaliana
MSYQDPQHPVSAPPPQGYPPKEGYPPAGYPPPAGYPPPQYPQAGYPPAGYPPPQQGYGQGYPAQGYPPPQYPQGHPPQYPYQGPPPPHYGQAPPKNKKDKKDSGGFMEGCLAMLCCCVLLEACF

SEQ ID NO: 4646 - protein, 452 aa, Arabidopsis thaliana
MPVDLDNSSTVSGEASVSISSTGNQNPLPNSTGKKKRNLPGMPDPESEVIALSPKTLLATNRFVCEICNKGFQRDQNLQLHRRGHNLPWKLRQKSNKEVKKKVYVCPEVSCVHHDPSRALGDLTGIKKHFCRKHGEKKWKCDKCSKKYAVQSDWKAHSKICGTKEYKCDCGTLFSRRDSFITHRAFCDALAEENARSHHSQSKKQNPEILTRKNPVPNPVPAPVDTESAKIKSSSTLTIKQSESPKTPPEIVQEAPKPTSLNVVTSNGVFAGLFESSSASPSIYTTSSSSKSLFASSSSIEPISLGLSTSHGSSFLGSNRFHAQPAMSATALLQKAAQMGAASSGGSLLHGLGIVSSTSTSIDAIVPHGLGLGLPCGGESSSGLKELMMGNSSVFGPKQTTLDFLGLGRAVGNGNGPSNGLSTLVGGGTGIDMATTFGSGEFSGKDISRRKS

SEQ ID NO: 4647 - protein, 166 aa, Arabidopsis thaliana
MIKAVMMMNTQGKPRLAKFYDYLPVEKQQELIRGVFSVLCSRPENVSNFLEIESLFGPDSRLVYKHYATLYFVLVFDGSENELAMLDLIQVLVETLDKCFSNVCELDIVFNYSKMHAVLDEIVFGGQVLETSSAEVMKAVEEISKLEAASNSISLVPKSVSGWRGR

SEQ ID NO: 4648 - protein, 231 aa, Arabidopsis thaliana
MGETATDSEHRMMIGLSDPMKIDPKRDRFPCCIVWTPLPFISWLVPFIGHVGICREDGVILDFAGPNFVCVDNFAFGAVSRYIQINKEMESSRSSSSGMFNGERRYEQEEDSHEKEPTWDDALRKSTQEYQHHSYNILTCNCHSFVANNLNRLSIKSGGWNVVNLATLVLFKGRWVNKTAIVKSLLPPLIVYTIGILLGGWTFIASCSILVVLLTGWFIIGTYCFKKLIQL

SEQ ID NO: 4649 - protein, 278 aa, Arabidopsis thaliana
MNASGLTVTPPRFHFRWRSDRFGTSQRSSQAFTVLSKLNNRNSAWPVLKSSRLALPTQRRNAMITRAMSASFGDMADDSAAIFPRINVKDPYKRLGISRMASEDEIQGARNFLIQQYAGHKPSVDAIESAHDKIIMQKFHERKNPKIDISKKVRQVRQSKVVNFVFERFQTPPNAVLVKTAVTFAVLGVLTVLFPTEEGPTLQVLLSLIATFYFIHQRLQKKLWTFLYGAGAFIFSWLVGTFLMVSVIPPFIKGPRGFEVMSSLLSYVLLWVASSYLR

SEQ ID NO: 4650 - protein, 521 aa, Arabidopsis thaliana
MNNMKRSKKPRVSWPPGPKLCQVKVFRTEDSPANVASQPQRHSYPSRKPRGPDLPPGFEGNHYAVKPNVSNIPRIKWKRPPPKFSVNDTWLVGCGGGSSEWQNENLRISKVLEAIYPHRSAIPSRPSVSPAVEAECFDDSKTPAIRLTPIEDESESSSEESSNSKVESGVTANKQGQLETKPLCSTQEQVSGLTGLAPDLSLAASAALTALMKTKEQGSLVDTELLIKFLSDPKLIKNLITDTSGKSSETKNQPIVTNINSATRPVPQPVSAVTASPMARKPQPVIIPQEHSVAVSRSFTNPERRVSPPKPVNGSISPPKPITGKPSSIPMPVHFHVGIAKEQPQPARFPSSSLPMNLNFHRPPNVFSEPKVIVNPQPQHQPYSAFRTSEMNYVQSSIGLGRGPQTGFNSYPMNFSRADAIGSAKPVVQPMKGLDYFKNLIREHGTDNHETNQYHSQTGIFNGRIDNNNKIHQQCIYFGTANGCNMGDSCTYVHDRYRPNFEAAAPRAKRMKFGRYERNGF

SEQ ID NO: 4651 - protein, 634 aa, Arabidopsis thaliana
MGCCQSRIDSKEIVSRCKARKRYLKHLVKARQTLSVSHALYLRSLRAVGSSLVHFSSKETPLHLHHNPPSPSPPPPPPPRPPPPPLSPGSETTTWTTTTTSSVLPPPPPPPPPPPPPSSTWDFWDPFIPPPPSSSEEEWEEETTTATRTATGTGSDAAVTTAPTTATPQASSVVSGFSKDTMTTTTTGSELAVVVSRNGKDLMEIIKEVDEYFLKAADSGAPLSSLLEISTSITDFSGHSKSGKMYSSSNYECNLNPTSFWTRGFAPSKLSEYRNAGGVIGGNCIVGSHSSTVDRLYAWEKKLYQEVKYAESIKMDHEKKVEQVRRLEMKRAEYVKTEKAKKDVEKLESQLSVSSQAIQSASNEIIKLRETELYPQLVELVKGSMYESHQVQTHIVQQLKYLNTIPSTEPTSELHRQSTLQLELEVQQWHHSFCNLVKAQRDYIQSLTGWLRLSLFQFSKNPLVRSSYESKIYSFCEEWHLAIDRIPDKVASEGIKSFLTAVHGIVAQQADEHKQKKRTESMLKDFEKKSASLRALESKYSPYSVPESRKKNPVIEKRVKVEMLKGKAEEEKSKHEKSVSVTRAMTLNNLQMGFPHVFQAMVGFSSVCMQAFESVYNQAKSIGEDQEEVKRLLP

SEQ ID NO: 4652 - protein, 197 aa, Arabidopsis thaliana
MSASRFVKCVTVGDGAVGKTCLLISYTSNTFPTDYVPTVFDNFSANVVVNGSTVNLGLWDTAGQEDYNRLRPLSYRGADVFILAFSLISKASYENVSKKWIPELKHYAPGVPIVLVGTKLDLRDDKQFFIDHPGAVPITTAQGEELRKQIGAPTYIECSSKTQENVKAVFDAAIRVVLQPPKQKKKKSKAQKACSIL

SEQ ID NO: 4653 - protein, 379 aa, Arabidopsis thaliana
MLSTLMKLLSACLWPSSSSGKSSDSTGKQDGLLWYKDFGQHLVGEFSMAVVQANNLLEDQSQVESGPLSTLDSGPYGTFIGIYDGHGGPETSRFVNDHLFQHLKRFAAEQASMSVDVIKKAYEATEEGFLGVVTKQWPTKPQIAAVGSCCLVGVICGGMLYIANVGDSRAVLGRAMKATGEVIALQLSAEHNVSIESVRQEMHSLHPDDSHIVMLKHNVWRVKGLIQISRSIGDVYLKKAEFNKEPLYTKYRIREPFKRPILSGEPTITEHEIQPQDKFLIFASDGLWEQMSNQEAVDIVQNHPRNGIARRLVKMALQEAAKKREMRYSDLKKIERGVRRHFHDDITVVIIFLDTNQVSSVKGPPLSIRGGGMTFPKKI

SEQ ID NO: 4654 - protein, 903 aa, Arabidopsis thaliana
MKWFLLMLIICNAVPLQGLTKIVSARPQVVNIGSVFTFNSLIGKVIKVAMDAAVEDVNASPSILNTTTLRIIMHDTKYNGFMSIMEPLQFMESETVAIIGPQRSTTARVVAHVATELKIPILSFSATDPTMSPLQFPFFIRTSQNDLFQMAAIADIVQFYGWREVVAIYGDDDYGRNGVAALGDRLSEKRCRISYKAALPPAPTRENITDLLIKVALSESRIIVVHASFIWGLELFNVARNLGMMSTGYVWIATNWLSTIIDTDSPLPLDTINNIQGVITLRLHTPNSIMKQNFVQRWHNLTHVGLSTYALYAYDTVWLLAQAIDDFFKKGGNVSFSKNPIISELGGGNLHLDALKVFDGGKIFLESILQVDRIGLTGRMKFTSDRNLVNPAFDVLNVIGTGYTTIGYWFNHSGLSVMPADEMENTSFSGQKLHSVVWPGHSIKIPRGWVFSNNGRHLRIGVPNRYRFEEVVSVKSNGMITGFCVDVFIAAINLLPYAVPFELVAFGNGHDNPSNSELVRLITTGVYDAGVGDITIITERTKMADFTQPYVESGLVVVAPVRKLGSSAMAFLRPFTPQMWLIAAASFLIVGAVIWCLEHKHNDEFRGPPRRQVITTFWFSFSTLFFSHRETTTSNLGRIVLIIWLFVVLIINSSYTASLTSILTVHQLSSPIKGIETLQTNHDPIGYPQGSFVRDYLIHELNIHVSRLVPLRSPEEYDKALRDGPGKGGVAAVVDERAYIELFLSNRCEFGIVGQEFTKNGWGFAFPRNSPLAVDVSAAILQLSENGDMQRIRDKWLLRKACSLQGAEIEVDRLELKSFWGLFVVCGVACVLALAVYTVLMIRQFGQQCPEEAEGSIRRRSSPSARIHSFLSFVKEKEEDAKARSSRERQLEDISANGSSRCN

SEQ ID NO: 4655 - protein, 549 aa, Arabidopsis thaliana
MYMEISSASDDSIAYVETDPSGRYGRFREVLGKGAMKTVYKAFDQVLGMEVAWNQVKLNEVFRSPEPLQRLYSEVHLLKNLNHESIIRYCTSWIDVNRRTFNFITELFTSGTLREYRRKYQKVDIRAIKSWARQILNGLAYLHGHDPPVIHRDLKCDNIFVNGHLGQVKIGDLGLAAILRGSQNAHSVIGTPEFMAPELYEEDYNELVDIYSFGMCVLEMLTGEYPYSECTNPAQIYKKVTSGKLPDSFHLIQHTEAQRFVGKCLETVSRRLPAKELLADPFLAATDERDLAPLFRLPQQLAIQNLAANGTVVEHLPSTTDPTRTTDMSITGKMNSEDHTIFLQVQILDGDGHMRNIQFPFNILSDTPLEVALEMVKELEITDWDPLEIAAMIENEISLLVPNWRANDSSIRHESFGHEDDEDNGDTEGRTRLFSSASSSHDSPVAVRENNDDSSNDVIPDMDDGNRSSNRLLNSSTYHYSPAIDDDQNQQQRRRVRLQQKMRSLVDTRTQVLHRSLMELINKRRGRGFDPNTNELQPQPSSTDFIRRC

SEQ ID NO: 4656 - protein, 540 aa, Arabidopsis thaliana
MDGYEATRIVLSRIQSLDPENASKIMGLLLLQDHGEKEMIRLAFGPETLVHSVIVKAKKELGLMNCSRSPWSHQDELISPKNNRGSSLNPASLPFYANGGRSSRDLTNDFELMDDMNSRSTDFLGSVHARSGSCVLDGLGYGGDSDLGFGGVPCSYFARGFCKNGASCRFVHSDGGADLVGSPSRIELLRSNSVPPRLAHHFMTRSSLPSFSTKGVNLQQNDVQRAAAALMIGDELQKLGRWRPERIDLSAMACPASRQIYLTFPADSRFREEDVSNYFSTFGPVQDVRIPYQQKRMFGFVTFVYPETVKSILAKGNPHFVCDSRVLVKPYKEKGKVPDKYRTNQTTERELSPTGLDSSPRDVLGGRGFYNNTQDVLWRSKFEEEILELQSRRLMNLQLLDVKKHFQLNSPTNIHSPNPFSQSLISPRPLSVIKREYDGGEKGKGSSKEGSDDDTMNLPERLEDSLPDSPFASPAHHLLLFADSADNNGSDLWSPSSDNDDNSTPSTLSDSFNSFNYQMPRLPAIGMLPGRGGPTCRVGI

SEQ ID NO: 4657 - protein, 499 aa, Arabidopsis thaliana
MHSLKTTCVGQIFALAKPHDSVGKRTRNRIPKEERKTLVESFIKKHQKLNNGSFPSLSLTHKEVGGSFYTIREIVREIIQENRVLGPGDLLLEGNGSVQDQSLSSSILMDPVPPLSLSPNGFHSGSYQSLDFSSESPEGNVNGSQVCLDNCREVSGSQLLKEDIGLVHQSMDSTDISMTQLATSCSEDNDIKSNAGLQNRMETVCDSVDTKPQDKRLDVDNKDEGFEELRFMESDGTKPVNNDDRVNDAGAAMTEIKNGLGTIDMSAETVVETFPLKSVTSTMDSPDAQPTELNKVCEGGKGTETEVEADRSTVNHVDLGEISSSTSSAVLEDIGTEVIVGQIPNHISVPMEKKVGEEIVNSASVDVECADAKETVVVNGVIGNVHETKEFSNGTLTAEQKMPTSSTESGSRKNDRAKVDTVSSYAGNEVASVEKKATMEKGKIDAPDSSSSQKENNATLNRIKPESWKGESNMGRQETNPLLAVLKSFVTAFVKFWSE

SEQ ID NO: 4658 - protein, 430 aa, Arabidopsis thaliana
MGKSWFSAVKKALSPEPKQKKEQKPHKSKKWFGKSKKLDVTNSGAAYSPRTVKDAKLKEIEEQQSRHAYSVAIATAAAAEAAVAAAQAAAEVVRLSALSRFPGKSMEEIAAIKIQTAFRGYMARRALRALRGLVRLKSLVQGKCVRRQATSTLQSMQTLARVQYQIRERRLRLSEDKQALTRQLQQKHNKDFDKTGENWNDSTLSREKVEANMLNKQVATMRREKALAYAFSHQNTWKNSTKMGSQTFMDPNNPHWGWSWLERWMAARPNENHSLTPDNAEKDSSARSVASRAMSEMIPRGKNLSPRGKTPNSRRGSSPRVRQVPSEDSNSIVSFQSEQPCNRRHSTCGSIPSTRDDESFTSSFSQSVPGYMAPTQAAKARARFSNLSPLSSEKTAKKRLSFSGSPKTVRRFSGPPKLESNVTKKDTNLA

SEQ ID NO: 4659 - protein, 72 aa, Arabidopsis thaliana
MEYAARRNQKGAFEGFYKLIMRRNSVYVTFIIAGAFFGERAVDYGVHKLWERNNVGKRYEDISVLGQRPVEE

SEQ ID NO: 4660 - protein, 466 aa, Arabidopsis thaliana
MAEKSFKYIILGGGVSASILKTSDSVLVLLLLLSVRKVYLCKITCRWLIGYAAKEFANQGVQPGELAVISKEAVAPYERPALSKGYLFPEGAARLPGFHCCVGSGGEKLLPESYKQKGIELILSTEIVKADLSAKSLVSATGDVFKYQTLIIATGSTVLRLTDFGVKGADSKNILYLREIDDADKLVEAIKAKKGGKAVVVGGGYIGLELSAVLRINNLDVTMVFPEPWCMPRLFTADIAAFYETYYTNKGVKIIKGTVASGFTAQPNGEVKEVQLKDGRTLEADIVIVGVGAKPLTSLFKGQVEEDKGGIKTDAFFKTSVPDVYAVGDVATFPLKMYGDVRRVEHVDHSRKSAEQAVKAIKAAEGGAAVEEYDYLPFFYSRSFDLSWQFYGDNVGDSVLFGDSNPSNPKPRFGAYWVQGGKVVGAFMEGGSGDENKALAKVAKARPSAESLDELVKQGISFAAKI

SEQ ID NO: 4661 - protein, 934 aa, Arabidopsis thaliana
MGSFAGACEIVEEKDDEVRLPKHSGRYGKSVMGSSSKDLVERKQREYHGSLEYDIDMLFQSISVKPSTTRLMSSSFHHHETSASAGPSRTTSPSKRIASMKKPGTPQSPRFVGLSDSVSLKQALRDRCISKASEMAAQKRLSKSAAASPRVSEADRIKSLYNQVSNESTSSRSGLVPVDKGKGSLVEIPLMPVNDKPSSSKSVPQRFEDPSNPISEPSQAGTSFGLQGVGNQTREIKLLHRSNKPGSCLSSGSGDYEIELDENVASPSTHAFVEDDVIEIDKHVTSLPSHSSKKVNATELDKNISSSAVDSEQKGKLDDAPNSGTENGKTVRKVTRMIPRPKQPKKKILLKKKLKIGVVSATYPTKDDEEIVPSLDSSANQLLCQRCHCSLKSTSIDDNPPSYTSSHNPKICTDSLSSVSNKEAHQGSDENSSGSCNVSQSSEADIVIMKQDVSSSNNSGIGAMVEKETENPTSSEKFEFSLSSKDSLGDYSRSTSISEESNLSRFSCGNKPHMSMDVRWEAIKHIKVQYGSLGLRHFNLLKKLGCGDIGTVYLAELIGTNCLFAIKVMDNEFLARRKKSPRAQAEREILKMLDHPFLPTLYAQFTSDNLSCLVMEYCPGGDLHVLRQKQLGRCFPEPAARFYVAEILLALEYLHMLGIIYRDLKPENILVREDGHIMLTDFDLSLRCAVNPTLVRSNSPPGKDPARISGPYNTSNCIQPFCITEPSCQVSCFSPRLSSNQQQGRKPKRGDHLSKTQQHLSRSLPQLVAEPTEARSNSFVGTHEYLAPEIIKGEGHGAAVDWWTFGVLLYELLYGKTPFKGYNNDETLANVVLQNLKFPDSPLVSFQAKDLIRGLLVKEPENRLGSEKGSVEIKRHPFFEGLNWALIRCAIPPELPDFYEYGGGPEAAADSPGGSNNRYLECKAIGDHLEFELF

SEQ ID NO: 4662 - protein, 527 aa, Arabidopsis thaliana
MHSSHLLLEEPIRMASILEPSKSSFFPALTKIVGTLGPKSRSVEALSGCLKAGMSVARFDFSWGDADYHQETLDNLKVAVRSTKKLCAVMLDTVGPELQVINKSEKAITLKADGLVTLTPNQDQEASSEVLPINFNGLAKAVKKGDTIFVGQYLFTGSETTSVWLEVDEVKGDDVICLSRNAATLAGSLFTLHSSQVHIDLPTLTEKDKEVISTWGVQNKIDFLSLSYCRHAEDVRQTREMLKKLGDLSQTQIFAKIENVEGLTHFDEILQEADGIILSRGNLGIDLPPEKVFLFQKAALYKCNMAGKPAVLTRVVDSMTDNLRPTRAEATDVANAVLDGSDAILLGAETLRGLYPVETISTVGRICAEAEKVFNQDLYFKKTVKYVGEPMTHLESIASSAVRAAIKVKASVIICFTSSGRAARLIAKYRPTMPVISVVIPRVKTNQLKWSFSGAFEARQSLIVRGLFPMLADPRHPAESTSATNESVLKVALDHGKHAGVIKSHDRVVVCQKVGDASVVKIIELED

SEQ ID NO: 4663 - protein, 280 aa, Arabidopsis thaliana
MNLSPFKRDIDELIDEFVEDDLTTFADMKSVWLSRKFSHIYEASPNSNLAFFMQSLYVHTIGHMVSIDSFSRRLGGLYCLYCLHEIQPFKPKFRIYISLQELGKFRDLVVEAKDKGVEIAAAVAKKMLDENMLIFGAVDETSATKTIHQLTELQNARVRFAYEKLICDTSINQFIHLDMGKEVDLNSLDKMSIEYAEAKKRAVEGAGEIMEIDDIKHISEEKELMGERMEKLKEEWDSQRLYFYEQTKLDGFTTTPKQLTNVEHDEDDGFDELDRLLSQS

SEQ ID NO: 4664 - protein, 284 aa, Arabidopsis thaliana
MPRYDDRYGNTRLYVGRLSSRTRTRDLERLFSRYGRVRDVDMKRDYAFVEFSDPRDADDARYYLDGRDFDGSRITVEASRGAPRGSRDNGSRGPPPGSGRCFNCGVDGHWARDCTAGDWKNKCYRCGERGHIERNCKNSPSPKKARQGGSYSRSPVKSRSPRRRRSPSRSRSYSRGRSYSRSRSPVRREKSVEDRSRSPKAMERSVSPKGRDQSLSPDRKVIDASPKRGSDYDGSPKENGNGRNSASPIVGGGESPVGLNGQDRSPIDDEAELSRPSPKGSESP

SEQ ID NO: 4665 - protein, 203 aa, Arabidopsis thaliana
MSSVCGGLDFKDAESSSASSPIICSTGVKHISCVGSDDAQESDGDDSGYIHQTVIEESKDKAISEPIPESLPLNSLDDESEDKNLATALQDMFSESMSVVTLIPAIKGGREKHGKSLEKLSVSWAEDVYDPPPSIVSHTRSKKQQPQKSKSKDNLKKNGKKGQKGSSNSRSSKDKKQISSRSSKYSRDKFDWTTQMSVLAASS

SEQ ID NO: 4666 - protein, 154 aa, Arabidopsis thaliana
MKKLLGGPGTVCGLLLRIGQCASAAASIGVMVSAKEFSVHTAFCYLIASMGLQLLWSFGLACLDVYALRGKKDLQNPILVSLFVVGDWVTAMLSLAAACSSAGVVVLYEKDIKYCNTQSQYPCLRYEVAVALSFVTWIQIAVSSHVTFWILASV

SEQ ID NO: 4667 - protein, 635 aa, Arabidopsis thaliana
MAVGDQTEQNYLPKKKKSETEDDKRRKKIVPGSLLKAVVRPGGGDSSPVDGDQVIYHCTVRTLDGVVVESTRSESGGRGVPIRDVLGNSKMILGLLEGIPTMHKGEIAMFKMKPEMHYAEIDCPVSAPENFPKDDELHFEIELLDFSKAKIASDDLGVIKKILNEGEGWESPREPYEVKARISAKSGDGHVIFSHTEEPYFFTFGKSEVPKGLEIGIGTMARKEKAVIYVRKQYLTESPLLHIDQDLEEVHFEVELVHFIQVRDMLGDGRLIKRRIRDGRGEFPMDCPLQDSRLSVHYKGMLLNEEKTVFYDSKIDNNDQPLEFSSGEGLVPEGFEMCTRLMLPGEIALVTCPPDYAYDKFPRPPGVSEGAHVQWEIELLGFETPRDWTGLNFQSIMDEADKIRSTGNRLFKEGKFELAKAKYEKVLREFNHVNPQDEDEGKIFGDTRNMLHLNVAACLLKMGEWRKSIETCNKVLEAKPGHVKGLYRRGMAYIAGGEYDDARNDFNMMIKVDKSSEADATAALLKLKQKEQEAESKARKQFKGLFDKRPGEITEVGSEIREESKTIEEVDETKDNDDDETLEEEGATTVSTERKRKWSEKAWPFLKNVMLQIGIQLGVVLIGILIFQFVSAKFT

SEQ ID NO: 4668 - protein, 467 aa, Arabidopsis thaliana
MEGRRITASPRPCSGRRIVAKKRSRPDGFVNSVKKLQRREISSRKDRAFSISTAQERFRNMRLVEQYDTHDPKGHCLVALPFLMKRTKVIEIVAARDIVFALAHSGVCAAFSRESNKRICFLNVSPDEVIRSLFYNKNNDSLITVSVYASDNFSSLKCRSTRIEYILRGQPDAGFALFESESLKWPGFVEFDDVNGKVLTYSAQDSVYKVFDLKNYTMLYSISDKNVQEIKISPGIMLLIFKRAASHVPLKILSIEDGTVLKSFNHLLHRNKKVDFIEQFNEKLLVKQENENLQILDVRNAELMEVSRAEFMTPSAFIFLYENQLFLTFRNRNVSVWNFRGELVTSFEDHLLWHPDCNTNNIYITSDQDLIISYCKADTEDQWIEGNAGSINISNILTGKCLAKITPSSGPPKDDESSSSNCMGKNSKQRRNAVAEALEDITALFYDEERNEIYTGNRHGLVHVWSN

SEQ ID NO: 4669 - protein, 653 aa, Arabidopsis thaliana
MAESGDFNGGQPPPHSPLRTTSSGSSSSNNRGPPPPPPPPLVMVRKRLASEMSSNPDYNNSSRPPRRVSHLLDSNYNTVTPQQPPSLTAAATVSSQPNPPLSVCGFSGLPVFPSDRGGRNVMMSVQPMDQDSSSSSASPTVWVDAIIRDLIHSSTSVSIPQLIQNVRDIIFPCNPNLGALLEYRLRSLMLLDPSSSSDPSPQTFEPLYQISNNPSPPQQQQQHQQQQQQHKPPPPPIQQQERENSSTDAPPQPETVTATVPAVQTNTAEALRERKEEIKRQKQDEEGLHLLTLLLQCAEAVSADNLEEANKLLLEISQLSTPYGTSAQRVAAYFSEAMSARLLNSCLGIYAALPSRWMPQTHSLKMVSAFQVFNGISPLVKFSHFTANQAIQEAFEKEDSVHIIDLDIMQGLQWPGLFHILASRPGGPPHVRLTGLGTSMEALQATGKRLSDFADKLGLPFEFCPLAEKVGNLDTERLNVRKREAVAVHWLQHSLYDVTGSDAHTLWLLQRLAPKVVTVVEQDLSHAGSFLGRFVEAIHYYSALFDSLGASYGEESEERHVVEQQLLSKEIRNVLAVGGPSRSGEVKFESWREKMQQCGFKGISLAGNAATQATLLLGMFPSDGYTLVDDNGTLKLGWKDLSLLTASAWTPRS

SEQ ID NO: 4670 - protein, 702 aa, Arabidopsis thaliana
MGALAQVVPWIPEDDLLLKNAVEAGASLESLAKGAVQFSRRFSIRELQDRWHALLYDPVVSVEAAFRMAELERTNPNFPTKFGRTGYSKENKSSSRKRNAERLRSTYHSLRKKFRTEPFNSLDLGFLVPPNDSHFMDNGDATHLGLEDSHMDIIHNAFPEILAEGGCVTTHVLPEDNLQGDIPYVEGENLTFTEHAGLSVCDVVHQDSEQKLENTAHEAKNTMASTDFLAQLSTSLFEEDMEPFMEVDGKEVDKSYYDGLSSLLVNSTNDTNREAFPNPTEQEPSIAPTHPGEATLDDHVMLELDGTIALDPHPEIVGGVICCLLNEEDPDIPCNDDIFLSNNSRPMSVSSLARRNFKDTNSPITTCVRDVSASKEKSEGYSLQAQKKKPGRLQGSTQGKPEMGQPSKGSKFRASTSTELKNTVAPGGSSSAQACSNTLLSTGTGAKDGKKETATGTLFVGSDGHGNHPEKDSENCKEKNVVPPVNESPHAKDTDDGLIEITVPELEITRAEAEAEAEAHVCESDEDLPNYSDIEAMILDMDLEPDDQDNFDLEVSKYQSQDMKRTIIRLEQAAHSYMQRAIASRGAFAVLYGRYSKHYIKKPEVLVGRSTEDLAVDIDLGREKRGSKISRRQAIIRLGDDGSFHIKNLGKYSISVNEKEVDPGQSLILKSDCLVEIRGMPFIFETNQSCMQEYLKRRGKVN

SEQ ID NO: 4671 - protein, 406 aa, Arabidopsis thaliana
MNRRNRGSSSSSSRVSNTYGNRQFSDNPRTGSGGGVNESFQRRSDAPHKRNNEKDESKHKDEDPADVSLIVGTCSSMCPERERVTRERLRDLAVFERLYGNPSKSSTEIAVKKFCRTLSAADVQASDVRPLPVLEETLRYLLSLLDSKEHPFEVVHDFIFDRTRSIRQDLSIQNLANERVIYLYEEMVKFHVISHERLQSCSGTSISSMHHLNMEQLAKTLTSLYNIYDANRKPDYIYENEAEFRSLYVLLHLNPSSGVMGEPLSLWFRKLTFALVKSKEICFVRNLLRLYRMGNYKNFLSRTASEATYLQYCISEHHIREMRLVAVQYINNVCYKLQPYPLLRLSQNLKMKELDVESLCHECGLETCTDPDGFTVLPVKQSTFRSPEDKFKVYDLIGIERIKMSI

SEQ ID NO: 4672 - protein, 819 aa, Arabidopsis thaliana
MRSVAAAAAAAAAASKPSNPLVAFEHKRDAYGFPVRPQHVQRYREYADIYKEEEEERSDRWSSFLEDHVESTELPTNGSSENIHAPFSESEKEKEKELNKGPGEDLHTDKLGSDVTPDNASEEEGHPDAEKNVHRVQLWTEIRPSLRSIEDLMSIRVKKKGDLSKSEQEAPKVKISPSFDDAKSSKGASDIDSEDEFYDVERSDVQDGSSSDGTGVSGIPVAADASPLSTCPWKEELEVLIRGGVPMALRGELWQAFVGVRKRRCKDYYQNLLAADGSVNTIEQEDMQHVDDKGSSTESIAVVEKWKGQIEKDLPRTFPGHPALDDDGRNALRRLLTAYARHNPSVGYCQAMNFFAALLLLLMPEENAFWALIGLIDDYFNGYYSEEMIESQVDQLVLEELVRERFPKLVHHLDYLGVQVAWVTGPWFLSIFMNMLPWESVLRVWDVLLFEGTRVMLFRTALALMELYGPALVTTKDAGDAVTLLQSLTGSTFDSSQLVLTACMGYQNVHEIRLQELRSKHRPAVIAALEERSKGLQAWRDSKGLASKLYNFKQDPKSVLVDSKASLSNGSLSRSESGSSNADEVLVSLTGDGEVDSVQDLQAQVLWLKAELCKLLEEKRSALLRAEELEIALMEIVKEDNRRQLSAKVEQLEQEMAEVQRLLSDKQEQEGAMLQVLMRVEQEQKVTEDARIFAEQDAEAQRYAAQVLQEKYEEAVAALAEMEKRAVMAESMLEATLQYQSGQLKAQPSPRQVNQDSSPEPPPSRISLLARPFGLGWRDKNKNTTPEKSPEHVNDEKQSSTEAKETNSEPTETKVQDIS

SEQ ID NO: 4673 - protein, 384 aa, Arabidopsis thaliana
MVSTTFRRIVSPCWRPFGIGEDSSPGSDDTNGRLDGLLWYKDSGNHITGEFSMAVVQANNLLEDHSQLESGPISLHESGPEATFVGVYDGHGGPEAARFVNDRLFYNIKRYTSEQRGMSPDVITRGFVATEEEFLGLVQEQWKTKPQIASVGACCLVGIVCNGLLYVANAGDSRVVLGKVANPFKELKAVQLSTEHNASIESVREELRLLHPDDPNIVVLKHKVWRVKGIIQVSRSIGDAYLKRAEFNQEPLLPKFRVPERFEKPIMRAEPTITVHKIHPEDQFLIFASDGLWEHLSNQEAVDIVNSCPRNGVARKLVKAALQEAAKKREMRYSDLEKIERGIRRHFHDDITVIVVFLHATNFATRTPISVKGGGLLSAHNPVL

SEQ ID NO: 4674 - protein, 463 aa, Arabidopsis thaliana
MLFCISTVKLFGFQQRRNVSSLAKRFSLAGKLTLELQTQASLDNNFLPWLERIAGAKITNTLSIGKSTYGRSLFASKVIYAGDCMLKVPFNAQITPDELPSDIRVLLSNEVGNIGMLAAVLIREKKMGQKSRWVPYISRLPQPAEMHSSIFWGEDELSMIRCSAVHQETVKQKAQIEKDFSFVAQAFKQHCPIVTERPDLEDFMYAYALVGSRAWENSKRISLIPFADFMNHDGLSASIVLRDEDNQLSEVTADRNYSPGDEVFIKYGEFSNATLMLDFGFTFPYNIHDEVQIQMDVPNDDPLRNMKLGLLQTHHTRTVKDINIFHSSCDTFTIKEVKSAIGKGKGIPQSLRAFARVLCCIIPQELNDLSKEAAQNDGRLARLPFKDGNRELEAHKILLSHINRLIEDHSVCIKEMEECYFVSQRFAVRRQMARDLLYGELRVLRSAAEWLNHYCTTLLSETM

SEQ ID NO: 4675 - protein, 331 aa, Arabidopsis thaliana
MTSLPYADADCSLRALAGRAEGFGRFAVGGLHGDLYVVTSLADDGPGTLREGGRRKEPLWIVFAVSGTINLNSYLSVSSYKTIDGRGQRIKLTGKGIRLKECEHIIICNLEFEGGRGHDVDGIQIKPKSRHIWIDRCSLRDYDDGLIDITRQSTDITVSRCYFAQHDKTMLIGADPSHVEDRCIRVTIHHCFFDGTRQRQPRLRFGKVHLYNNYTRNWGIYAVCASVEAQVFSQCNIYEAGVKKKTFEYYSEKAADKEEARTGLVRSENDLFLNGAQPSLMTGASEECVFHPSEHYPTWTVEPPSETLKQIMQICTGWQSLSRPSDHGVPK

SEQ ID NO: 4676 - protein, 1115 aa, Arabidopsis thaliana
MFNKFGSTSETLSKASAGLLRIGTDAHLYDDPEDVNIAPLLDSKFESEKCEALKRLLALIAQGFDVSNFFPQVVKNVASQSSEVKKLVYLYLLQYAEKRPNEALLSINYFQKDLGDPNPLVRAWALRTMAGIRLHVIAPLALAAVSKCARDPAVYVRRCAANALPKLHDLRLEEHASAIEELVGILLNDHSPGVVGAAAAAFTSICPNNFKLIGKNYKKLCQILPDVEEWGQILLIGTLLRYVVARHGLVRESLMLSIHGTNSNGFCEKDGLGRDLTLDKEDGGKSDSFDVNLVSLVSKCYIQGPDEYLSRSSCTDTVSSAFDTKETTSIAHNEDVKILLQCTSPLLWSNNSAVVLAAAGVQWIMAPLEDVKKIVKPLLFLLRSSSASKYVVLCNILVFAKAVPSLFAPHFENFFICSSDAYQVKAYKLEMLSLIATTSSIASILREFEDYIKDPDRRFAADTVAAIGLCAKRLMTIPTTCLDGLLALVRQESFAGDFESADGEAGVLVQAVMSIQTMIERDPLRHEKVLIQLFRSLDSIKVAAARATIIWMVGVYCSLGHIIPRMLTTITKYLAWSFKSEASETKLQILNTIAKVLISAEAGDFHMLKRIVVYVFELGEYDLSYDIRDRTRFLKKLLSCKLASHEPAEDSVASQENIAAHVVEHVFGRKLKSVSPITLHNRFYLPGSLSQIVLHAAPGYEPLPKPCSFVYEEQDQLSDLDKQREAAADLDGSEESSETGDENGSSDYDSESSNGSDFSSEGDERTVSNDANDPAAPLIQISETSVSADQEELRSRRALDLWLDDQPSTSNQTPSALNSNQSSYAKISIGDVGSRVKPKSYSLVDPGNGSGLKVDYAFLSEVSNVSPLHVCVEVLFENSSAEPILEVNLEDEESMKVADSSEQTLVGKANASYNNIPTLIPMEEISCLEPHQSTKRLIQVRFHHHLLPMRLTLHYNEKKVPVKLRPDLGYLVKPFSMSIEEFLATESRLPGMFEYSRRCTFDDHVKDSRTENGKDKFLSICESITLKVLSNSNLHLVSVDLPVANSLEDATGLRLRFSSKILSSEIPLLITITVEGKCTEVLNLTVKINCEETVFGLNLLNRIANFMVEPSSSAT

SEQ ID NO: 4677 - protein, 310 aa, Arabidopsis thaliana
MANPWWVGNVAIGGVESPVTSSAPSLHHRNSNNNNPPTMTRSDPRLDHDFTTNNSGSPNTQTQSQEEQNSRDEQPAVEPGSGSGSTGRRPRGRPPGSKNKPKSPVVVTKESPNSLQSHVLEIATGADVAESLNAFARRRGRGVSVLSGSGLVTNVTLRQPAASGGVVSLRGQFEILSMCGAFLPTSGSPAAAAGLTIYLAGAQGQVVGGGVAGPLIASGPVIVIAATFCNATYERLPIEEEQQQEQPLQLEDGKKQKEENDDNESGNNGNEGSMQPPMYNMPPNFIPNGHQMAQHDVYWGGPPPRAPPSY

SEQ ID NO: 4678 - protein, 204 aa, Arabidopsis thaliana
MKKPHFLKNPVFFLFLLITVSSLTILIFSFLKLPETPLAAGNHLRKLRYELTDELGLFGKMMIEMLPEDLVFTAFVPSEKSFSRDLGLKLNTSRPIKSHEEDDDGDNTYAVVSRIMSFAVVPYKVEEVDIGNDETASYESLSGFTLQIWRKRNGGGLVVNGVETEKMGLKRGKIIVHIMNGVVMDSDFAQSIASSTPKDEDDDP

SEQ ID NO: 4679 - protein, 461 aa, Arabidopsis thaliana
MAQVGLRGVSQKDEFCKMVKDAVQNAKEGSWILGGGWNNDFWGGELPSASWIDEISPRNPVWLIRMDGHMALANSLALKIAGVISLTEDPVGGTIMRMPSGEPTGLLIDAAMELVTPWVKEISVDERREALFRASKYALTRGVTTVIDLGRYFPGTTDELSWKDFQDVYLYADSSKKMMIRTCLFFPITTWSRLLDLKLQKGSVLSEWLYLGGVKAFIDGSLGSNSALFYEEYIDTPNNYGLEVMDPEKLSNFTMAADKSGLQVAIHAIGDKANDMILDMYESVAAANGDRDRRFRIEHAQHLAPGSANRFGQLHIVASVQPDHLLDDADSVAKKLGSERAVKESYLFQSLLNGNALLALGSDWPVADINPLHSIRTAVKRIPPKWDHAWIPSERISFTDALIAQTISAARAAFLDHHLGSLSPGKLADFVILSTNSWDEFSKDVSASVLATYVGGKQLYP

SEQ ID NO: 4680 - protein, 154 aa, Arabidopsis thaliana
MMMMKGNGSKSSLNSLISSLGDSARELIKLRSTLRMDGDVSITGLIAIIASFQSVELQIQAIKDLLRQRKEAIPNGKLSRYFYSFTLFDVEMTVSEIETLQRIISPFAEFYTNMARELHPELFSDDSNTWRWLLSQAQPRKYNRTTNFKMNRNR

SEQ ID NO: 4681 - protein, 281 aa, Arabidopsis thaliana
MASSAALGSLHQTLGSAINSQSEVHSLSGNWSASGNSCVPRWRLSNRNSNYRLVLRAKAAKSSTTTISDGSSDASVSDGKKTVRRITFPKEVEALVHEMCDETEVAVLQLKVGDFEMNLKRKIGAATNPIPVADISPTVAPPIPSEPMNKSASSAPSPSQAKPSSEKVSPFKNTSYGKPAKLAALEASGSTNYVLVTSPAVGKFQRSRTVKGKKQSPSCKEGDAIKEGQVIGYLHQLGTELPVTSDVAGEVLKLLSDDGDSVGYGDPLVAVLPSFHDINIQ

SEQ ID NO: 4682 - protein, 446 aa, Arabidopsis thaliana
MAERQQSPAAETIPGTPVIREVRTGTGSENFNPENTRRGCLRAEIDISPQLYGGRGFWVPFNLEDNYDCVGEFDIKRMEEQTVELEKDLIMKELETLDLLEALGSTKRIFEDLKWQLQQQALRCKETPQHLRSHSKEMVDEHCHRNPLKSPDLMTMEMKQAGMNLCKTMDDLALIHSYAESLNMKTKEEKDVLGVASLAEELNSLKFKPAGPDQVERFNTENLPVNPQCEQIKMVVETYDTAFHKQSKTCPRTADMRLVAARKMEEAARAAEALALAEMTILSSRRNQDALCFPKTPCFPLTLKAQMNKELSTNVSRIEILRKLEEANEEVKQSKQALEVALNRVEIASVKQLEAEEAFRQWNIESWKDQKAVGAKRSMKRESFPQRSFLSHINQHEPLIDLPEPMLKRNVSMGNALNRKDEKQLVTPRRKFRFIQTHQASIRKTE

SEQ ID NO: 4683 - protein, 320 aa, Arabidopsis thaliana
MSSIRNTHWCHRCQRAVWLRARDAVCSYCGGGFVEEIDIGPSRAHRDVERDPTFDLMEAFSAFMRSRLAERSYDREISGRLGSAGSESFSNLAPLLIFGGQAPFRLAGGDNSSVEAFVNGAAPGIGIARGTNAGDYFFGPGLEELIEQLSSGTHHRGPPPAPKSSIDALPTIKITQKHLKSSDSHCPVCKDEFELKSEAKQMPCHHIYHSDCIVPWLVQHNSCPVCRKELPSRGSSSSTQSSQNRSTNGRENSRRRNIFSNLWPFRSSSSSSTQNRRDTNNTATAEEGHYHHHQQQQQQHQHQHQQQQSHMGYSGWPFDY

SEQ ID NO: 4684 - protein, 297 aa, Arabidopsis thaliana
MDSQRGIVEQAKSQSLNRQSSLYSLTLDEVQNHLGSSGKALGSMNLDELLKSVCSVEANQPSSMAVNGGAAAQEGLSRQGSLTLPRDLSKKTVDEVWKDIQQNKNGGSAHERRDKQPTLGEMTLEDLLLKAGVVTETIPGSNHDGPVGGGSAGSGAGLGQNITQVGPWIQYHQLPSMPQPQAFMPYPVSDMQAMVSQSSLMGGLSDTQTPGRKRVASGEVVEKTVERRQKRMIKNRESAARSRARKQAYTHELEIKVSRLEEENERLRKQKEVEKILPSVPPPDPKRQLRRTSSAPF

SEQ ID NO: 4685 - protein, 793 aa, Arabidopsis thaliana
MFSHQKWKFSWSQIATVASVIVLVSLVHLFLGPVVPSFDSITVRQAQNLCGPSNESISQVTKNSSQSLVVVAFDRRFPADSHGAVVYRNASWKAEIGQWLSSCDAVAKEVDIIEPIGGRKCMSDCSGQGVCNHEFGLCRCFHGFTGEDCSQKLRLDCNYEKTPEMPYGKWVVSICSRHCDTTRAMCFCGEGTKYPNRPVPESCGFQINSPTNPDEPKMTDWSKPDLDILTTNSSKQGWCNVDPEDAYAMKVKIKEECDCKYDCLWGRFCEIPVQCTCVNQCSGHGKCRGGFCQCDKGWFGTDCSIPSTLSTVGEWPQWLRPAHLEVPSEKNVPGNLINLSAVVKKKRPLIYIYDLPPDFNSLLIEGRHFKFECVNRIYDERNATVWTDYLYGSQMAFYENILATAHRTMNGEEADFFFVPVLDSCIINRADDAPHINMQNHTGLRSSLTLEFYKRAYEHIVEKYPYWNRSAGRDHIWFFSWDEGACYAPKEIWNSMMLVHWGNTNSKHNHSTTAYFGDNWDDISDERRGDHPCFDPRKDLVIPAWKVPDPYSMRKNYWERPREKRKTLFYFNGNLGPAYEKGRPEDSYSMGIRQKLAEEFGSSPNKEGKLGKQHAEDVIVTPLRSDNYHKDIANSIFCGAFPGDGWSGRMEDSILQGCVPVIIQDGIYLPYENMLNYESFAVRVNEDDIPNLINTLRGFSEAEIQFRLGNVKELWQRFLFRDSILLEAERQKATYGHEEDWAVQFSKLKHDDIFATIIQTLHFKLHNDPWRREQAVNRTKDYGLPQECLHKTS

SEQ ID NO: 4686 - protein, 490 aa, Arabidopsis thaliana
MMGSILLLLLFFSLVQSRSDTSYSKIQLPGDSLTLSVTDFGATGDGINYDTSAIQSTIDACNRHYTSFSSICRVVFPSGNYLTAKLHLRSGVILDVTENAVLLGGPRIEDYYPAETSSDWYVVVANNATDVGITGGGAIDGQGSKFVVRFDEKKNVMVSWNQTGACLGDECRPRLVGFVDSINVEIWNITLREPAYWCLHIVRCENTSVHDVSILGDFNTPNNDGIDIEDSNNTVITRCHIDTGDDAICPKTYTGPLYNLTATDCWIRTKSSAIKLGSASWFDFKGLVFDNITIFESHRGLGMQIRDGGNVSDVTFSNINISTRYYDPSWWGRAEPIYITTCPRDSSAKEGSISNLLFVNITIDSENGVFLSGSPNGLLSDIKFKNMNLTFRRWSNYSAGLVDYRPGCQGLVNHRATSGIIMEHVNGFRVENVDLKWSDDDDVNAAWNVPLEFRPSTVNNVSFVGFTSGLYTKLFESDYVMVGENNIAFA

SEQ ID NO: 4687 - protein, 436 aa, Arabidopsis thaliana
MGEELADTMNLDLNLGPGPESDLQPAPNETVNLADWTNDPPERSSEAVTRIRTRHRTRFRQLNLPIPVLSETHTMAIELNQLMGNSVNRAAMQTGEGSERGNEDLKMCENGDGALGDGVLDKKADVEKSSGSDGNFFDCNICLDLSKEPVLTCCGHLYCWPCLYQWLQISDAKECPVCKGEVTSKTVTPIYGRGNHKREIEESLDTKVPMRPHARRIESLRNTIQRSPFTIPMEEMIRRIQNRFDRDSTPVPDFSNREASERVNDRANSILNRLMTSRGVRSEQNQASAAAAAIVAASEDIDLNPNIAPDLEGESNTRFHPLLIRRQLQSHRVARISTFTSALSSAERLVDAYFRTHPLGRNHQEQNHHAPVVVDDRDSFSSIAAVINSESQVDTAVEIDSMALSTSSSRRRNENGSRVSDVDSADSRPPRRRRFT

SEQ ID NO: 4688 - protein, 612 aa, Arabidopsis thaliana
MSASWADVADSEKAVSQSKPPYVPPHLRNRPSEPVAAPLPQNDHAGYGGQPAGSRWAPPSSGGGGASGGGYRNDGGRTGYGYGAGGGGGGGGGWNNRSGGWDRREREVNPFGDDAELEPVFTEQENTGINFDAYEDIPVETSGGDVPPPVNTFADIDLGDALNLNIRRCKYVRPTPVQRHAIPILLAERDLMACAQTGSGKTAAFCFPIISGIMKDQHVERPRGSRAVYPFAVILSPTRELACQIHDEAKKFSYQTGVKVVVAYGGTPIHQQLRELERGCDILVATPGRLNDLLERARVSMQMIRFLALDEADRMLDMGFEPQIRKIVEQMDMPPRGVRQTMLFSATFPSQIQRLAADFMSNYIFLAVGRVGSSTDLITQRVEFVQESDKRSHLMDLLHAQRETQDKQSLTLVFVETKRGADTLENWLCMNEFPATSIHGDRTQQEREVALRSFKTGRTPILVATDVAARGLDIPHVAHVVNFDLPNDIDDYVHRIGRTGRAGKSGIATAFFNENNAQLARSLAELMQEANQEVPEWLTRYASRASFGGGKKRSGGRFGGRDFRREGSYSRGGGGGGGGGGSDYYGGGGYGGGGYGGAPSGGYGAGVTSAWD

SEQ ID NO: 4689 - protein, 418 aa, Arabidopsis thaliana
MFVKSQSFLFSVSKLFHQHQQWRGMGAMTKVRLKWVKNKNLDHVIDTETDLKAACILKDAIKRSPTGFLTAKSVADWQKLLGLTVPVLRFLRRYPTLFHEFPHARYASLPCFKLTDTALMLDSQEEIIHQSHEADTVERLCRVLMMMRSKTVSLRSLHSLKFDLGLPDNYEKTLVMKYPDHFCFVKASNGNPCLKLVKWRDEFAFSALQKRNEDNDVSGEESRYREFKRGQSTLTFPMSFPRGYGAQKKVKAWMDEFQKLPYISPYDDPSNIDPESDLMEKRAVAVLHELLSLTIHKKTKRNYLRSMRAELNIPHKFTRLFTRYPGIFYLSLKCKTTTVILKEGYRRGKLVDPHPLTRLRDKFYHVMRTGFLYRARGLGMVSKEELLLDRPEDDLEEEGSEEEEIVEGSELEEDSEAE

SEQ ID NO: 4690 - protein, 602 aa, Arabidopsis thaliana
MLSVIRVHLPSEIPIVGCELTPYVLLRRPDKTPSTDDVPESAPLEGHFLKYRWFRVQSDKKVAICSVHPSETATLQCLGCLKSKVPVAKSYHCSTKCFSDAWQHHRVLHERAASAATEGNDEEELPRLNSSGSGSGVLSTSVSLTNGSSSVYPSAITQKTGAGGETLVEVGRSKTYTPMADDICHVLKFECVVVNAETKQNVGLSCTILTSRVIPAPSPSPRRLISISGTDVTGHLDSNGRPLSMGTFTVLSYNILSDTYASSDIYSYCPTWALAWTYRRQNLLREIVKYRADIVCLQEVQNDHFEEFFLPELDKHGYQGLFKRKTNEVFIGNTNTIDGCATFFRRDRFSHVKKYEVEFNKAAQSLTEAIIPVSQKKNALNRLVKDNVALIVVLEAKFGSQAADNPGKRQLLCVANTHVNVPHELKDVKLWQVHTLLKGLEKIAASADIPMLVCGDFNTVPASAPHTLLAVGKVDPLHPDLMVDPLGILRPHSKLTHQLPLVSAYSQFAKMGGNVITEQQRRRLDPASSEPLFTNCTRDFIGTLDYIFYTADTLTVESLLELLDEESLRKDTALPSPEWSSDHIALLAEFRCMPRARRNNIL

SEQ ID NO: 4691 - protein, 820 aa, Arabidopsis thaliana
MDVVERKRPRGAFLNLFDWHGKSRKKLFSSNLSQLSEESKQAKENVQNPSITPHSVFEVDQSVKNPTYNPRSDSSCCASSVTSDDGNVVRASVVARLMGLEGLPLPNVLEPRVNPDLDPYFLRSSRQANTWDANVDRQSDFDGVSWDHLDSRTSKGPRKRMIERFQTETLPPRSAKPISVTHNKLLSPIRNPGFVPSRNPAYVMEAASRMIEQSPRMIARTRMVSSSDSSSPVPLRIRDLKEKLEAAQKASTSVPQISNDTRNSRYLRGDQNEKKTTVLGKNSYDALKGGEVKPPSFAAQAKVSSNQKQDSLSMSSSGNKRMSSGQKEKVEAKNRAVKSQNSSKGSSLSTGKNVLRQNNQKQNCRDNQQSRRVMNKVVNKVLVESGSISKSSGFTMSSAEKPTSLPLSRKKSLPRSKKPRNGVQESGIYEDKRIKRGEKSIKCNISIDGDSSTSKDDQKRDMDVISFTFSSSIKGLSSPHSQGTKQDADSAIRFNVIGGDSLNALLEQKLRELTTKIESSSSSLIQEEPLSSISKDRANAMISSPSKYSGLTQSSLDRVLTESESVSDCTSFFNSQKVQKQKVIQGEEQEVSSITTLTEADDFALSCSKSISDCRHDREYGMKQSSSDQELTWGSSNESQHTLDETESATLDWELEYITEILNSGQLMFQDFASGTTTNESLLPSSLFDEMERSRGAATSMKTERKALFDCVNQCLAVKFERMLIGSCKGMMMSGGILLEHRDLLAEEVNREVKGLKKMREMMIDELVDHDMSCFEGRWIGYEREMFEEGIDMEGEIVSALVDDLVSDILSTSVLKRSLL

SEQ ID NO: 4692 - protein, 242 aa, Arabidopsis thaliana
MPYFIQRLFNTCKSSLSPNGPVSEEALDKVRNVLEKIKPSDVGLEQEAQLVRNWPGPGNERNGNHHSLPAIKYLQLHECDSFSIGIFCMPPGSIIPLHNHPGMTVLSKLVYGSMHVKSYDWAEPDQSELDDPLQARPAKLVKDIDMTSPSPATTLYPTTGGNIHCFKAITHCAIFDILSPPYSSTHGRHCNYFRKSPMLDLPGEIEVMNGEVISNVTWLEEYQPPDNFVIWRVPYRGPVIRK

SEQ ID NO: 4693 - protein, 251 aa, Arabidopsis thaliana
MMMGIPVELEVTTVENHNEMGESSGQAMIEQDDDNHNELGENSGEQDEKVDLDSIPLAVADMTEAQGDEPYVGQEFESEAAAHGFYNAYATKVGFVIRVSKLSRSRHDGSPIGRQLVCNKEGYRLPSKRDKVIRQRAETRVGCKAMILIRKENSGKWVITKFVKEHNHSLMPGRVRRGCIYDQYPNEHDKIQELMQQLAAEKKRAATYKRHLEMLFEQIEQHNESLSKRIQHIVDNVRNLEQRDHQQNHQV

SEQ ID NO: 4694 - protein, 720 aa, Arabidopsis thaliana
MFSAGEGKKWTRRKAGLVSLQKVASLVRDLREPCLSQSRIQVVLTIGKMLKPEKWQALFDGDGKVSSFHKALKLIILGGIDPSIRAEVWEFLLGCYALSSTSEYRTQLRVARRERYNELLKQCQMMHSTVGTGSLAYVVGSKVMDMRKSYKNEVVKEDIDESREACLDGHENTDNHGDWSNNDTEKSPVRRSGSSSESVDLVSPDSTIYETSSFVPPSSPYGFPSPGPFADDIFDFPSLPVTDLFGRSSLGKKGLSTPDEETSTQSDLRSEDERMHSFRIDKNADLVIEPHGSSYNDVTASINSEIEVVHLQSVEKLSHSVCTSEIVDGLRISDVPETPSARETHTRGGTVKEDRVSEWLWTLHRIVVDVVRTDSHLEFYEDPGNLGRMSDILAVYAWVDPATGYCQGMSDLVSPFVFLFEDNADAFWCFEMLIRRTRANFQMEGPTGVMDQLQSLWRILQLTDKEMFSHLSRIGAESLHFAFRMLLVLFRRELSFNKALRMWEMMWAADFDESFAETLEKDCLKPLVVQLPKRSGVDMGDHKIDDGNGTTTNSESTSKSDRTSKSSLLSKSGLLPESGPLPKTGPLSDDFGMKPAVSSCGKGDDPLPVFCVAAILIMNRHKIMKETRSIDDMIKICNDKLLAIRVRRCIRTAIKLRKKYLYKNQVIKIESHIQSQNHKHHEIQNQTAMENQIPEEITSHDENCSQRPSLCNGPVMPLRE

SEQ ID NO: 4695 - protein, 1646 aa, Arabidopsis thaliana
MDLHPPGGSKKTSVVVVTLDTGEVYVIASLLSKADTQVIYIDPTTGILRYNGKPGLDNFKSEREALDYITNGSRGGVRSSVYARAILGYAVLGSFGMLLVATRLNPSIPDLPGGGCVYTVAESQWVKIPLYNPQPQGKGETKNIQELTELDIDGKHYFCDTRDITRPFPSRMPLQSPDDEFVWNRWLSVPFKNIGLPEHCVILLQGFAEYRPFGSSGQLEGIVALMARRSRLHPGTRYLARGINSCSGTGNEVECEQLVWIPKRNGQSIAFNSYIWRRGTIPIWWGAELKMTAAEAEIYVADRDPYKGSTEYYQRLSKRYDTRNLDAPVGENQKKKAFVPIVCVNLLRSGEGKSECILVQHFEESMNFIKSSGKLPYTRVHLINYDWHASVKLKGEQQTIEGLWMYLKSPTMAIGISEGDYLPSRQRLKDCRGEVICIDDIEGAFCLRSHQNGVIRFNCADSLDRTNAASFFGGLQVFVEQCRRLGISLDTDLGYGHNSVNNQGGYNAPLPPGWEKRADAVTGKSYYIDHNTKTTTWSHPCPDKPWKRLDMRFEEFKRSTILSPVSELADLFLQQGDIHATLYTGSKAMHSQILNIFSEESGAFKQFSAAQKNMKITLQRRYKNAMVDSSRQKQLEMFLGMRLFKHLPSIPVQPLHVLSRPSGFFLKPVPNMSESSNDGSSLLSIKRKDITWLCPQAADIVELFIYLSEPCHVCQLLLTISHGADDLTCPSTVDVRTGRHIEDLKLVVELVQLDYRLPVIMFSGQGASIPRCANGTNLLVPLPGPISSEDMAVTGAGARLHEKDTSSLSLLYDFEELEGQLDFLTRVVAVTFYPAGAVRIPMTLGQIEVLGISLPWKGMFTCERTGGRLAELARKPDEDGSPFSSCSDLNPFAATTSLQAETVSTPVQQKDPFPSNLLDLLTGEDSSSDPFPQPVVECIASGGNDMLDFLDEAVVEYRGSDTVPDGSVPQNKRPKDSGAHLYLNCLKSLAGPNMAKKLEFVEAMKLEIERLRLNISAAERDRALLSIGIDPATINPNSSYDELYIGRLCKIANALAVMGQASLEDKIIASIGLEKLENNVIDFWNITRIGEGCDGGMCQVRAEVNKSPVGSSTKSSRGESGSVFLCFQCMKKACKFCCAGKGALLLSKSYSRDTANGGGSLADVSATSIGSDHYICKKCCSSIVLEALIVDYVRVMVSLRRSGRVDNAGREALNEVFGSNITNHLAVRGQPSPNREDFNFLRQILGKEESLSEFPFASFLHKVETATDSAPFFSLLTPLNLASSNAYWKAPPSADSVEAAIVLNTLSDVSSVILLVSPCGYSDADAPTVQIWASSDINKEARTLMGKWDVQSFIRSSPELSGSEKSGRAPRHIKFAFKNPVRCRIIWITLRLPRLGSSSSVSLDKNINLLSLDENPFAPIPRRASFGATIENDPCIHAKHILVTGNTVRDKTLQSVESMSVRNWLDRAPRLNRFLIPLETERPMENDLVLELYLQPASPLAAGFRLDAFSAIKPRVTHSPSSDVVDIWDPTSVIMEDRHVSPAILYIQVSVLQEQYKMVTIAEYRLPEARDGTKLYFDFPKQIQAQRVSFKLLGDVAAFTDEPAEAVDLSSRASPFAAGLSLANRIKLYYYADPYEVGKWTSLSSV

SEQ ID NO: 4696 - protein, 1727 aa, Arabidopsis thaliana
MSYNQSRPDRSETQYRRTGRSTGNQQQQQQHRSSSAAGYGKGAGAPGSAPAPSTYPDNSSLSSNRSFKKPGNAQGGGQPRVNLPPVNHPNNHNNGPNAHSRSQVTGEPGVGGPTNPTESFNRNTGPIPKAPTSQSTVMSSKINETPNTAKVAASGDASQAFPLQFGSLGPDLMVPARTTSAPPNMDDQKRAQMQQSSLRTASNVPASVPKKDSSNKGADNQLMRKEGHNPSSEKADIQVPHIAPPSQTQKSPITNIRMPSVQTPYQHTQVPHPVHFGGPNMHMQTPVTATSFQMPMPMALSMGNTPQIPPQVFYQGHPPHPMHHQGMMHQAQGHGFATPMGAQIHPQLGHVGVGLSPQYPQQQGGKYGGARKTTPVKITHPDTHEELRLDRRGDPYSEGDSTALKPHSNPPPRSQPVSSFAPRPVNLVQPSYNSNTMIYPPVSVPLNNGPMSSAQAPRYHYPVIDGSQRVQLINQPAHTAPQLIRPAAPAHLSSDSTSSVKARNAQNVMSSALPVNAKVSVKPAGVSEKLGSPKDRSHGEVNISLSQKNVEACSLSSSQQPKPSFVSGVPNSSAPPAKSPVETVPLAKSSVETVPPVKSSVETAPVTTTEIRRAEMVSESISVEDQTCKVEPPHNLTENRGQTMPDSLVSDPETATVAAKENLSLPATNGFRKQLLKVSTTSDAPTSDSVDTSIDKSTEGSSHASSEISGSSPQEKDLKCDNRTASDKLDERSVISDAKHETLSGVLEKAQNEVDGATDVCPVSEKLAVTDDTSSDLPHSTHVLSSTVPLGHSETHKSAVETNTRRNTSTKGKKKIKEILQKADAAGTTSDLYMAYKGPEEKKESSNVVHDVSNQNLLPAIPQAVEAIVDTEPVKNEPEDWEDAADVSTPKLETADNSVNAKRGSSDEVSDNCINTEKKYSRDFLLKFADLCTALPEGFDVSPDIANALIVAYMGASHHEHDSYPTPGKVMDRQASGARLDRRPSNVAGDDRWTKNQGSLPAGYGGNVGFRPGQGGNSGVLRNPRMQGPIISRPMQPVGPMGGMGRNTPDLERWQRGSNFQQKGLFPSPHTPMQVMHKAERKYQVGTIADEEQAKQRQLKSILNKLTPQNFEKLFEQVKSVNIDNAVTLSGVISQIFDKALMEPTFCEMYADFCFHLSGALPDFNENGEKITFKRLLLNKCQEEFERGEKEEEEASRVAEEGQVEQTEEEREEKRLQVRRRMLGNIRLIGELYKKRMLTEKIMHACIQKLLGYNQDPHEENIEALCKLMSTIGVMIDHNKAKFQMDGYFEKMKMLSCKQELSSRVRFMLINAIDLRKNKWQERMKVEGPKKIEEVHRDAAQERQTQANRLSRGPSMNSSGRRGHMEFSSPRGGGGMLSPPAAQMGSYHGPPQGRGFSNQDIRFDDRPSYEPRMVPMPQRSVCEEPITLGPQGGLGQGMSIRRPAVASNTYQSDATQAGGGDSRRPAGGLNGFGSHRPASPVTHGRSSPQERGTAYVHREFASLSRASDLSPEVSSARQVLQGPSATVNSPRENALSEEQLENLSLSAIKEYYSARDENEIGMCMKDMNSPAYHPTMISLWVTDSFERKDKERDLLAKLLVNLVKSADNALNEVQLVKGFESVLKTLEDAVNDAPKAAEFLGRIFGKSVTEKVVTLTEIGRLIQEGGEEPGSLIEFGLGGDVLGSVLEMIKTEAGEETLVEIRRSSGLRIENFKPHAPNRSKILEKFT

SEQ ID NO: 4697 - protein, 81 aa, Arabidopsis thaliana
MVGGGAPQRGSAAATASMRRRKPAGGSSSAGGGAGTMLQFYTDDAPGLKISPNVVLIMSIGFIAFVAVLHVMGKLYFVKSK

SEQ ID NO: 4698 - protein, 307 aa, Arabidopsis thaliana
MHRSGTTMAWNVFKFCTALRGLGSIMILLVLGVVGVTYYAVVLTNYGPALSQGGLDSLAALTILILFHFLLAMLLWSYFSVVFTDPGVVPPNWRPSTDEERGESDPLNSLDFVGLQSDSSSSNPRVRFCRKCNQLKPSRCHHCSVCGRCVLKMDHHCVWVVNCVGALNYKYFLLFLFYTFLETTLVTLVLMPHFIAFFSDEEIPGTPGTLATTFLAFVLNLAFALSVMGFLIMHISLVAGNTTTIEAYEKKTTTKWRYDLGKKKNFEQVFGMDKRYWLIPGYTEEDLRRMPELQGLEYPSKPDFDSQ

SEQ ID NO: 4699 - protein, 438 aa, Arabidopsis thaliana
MNVVRRLTSIASGRNFVSSDNVGETETPRSKPNQNREETESTETTSYEKDSVSSSENSDHLPKEIREVGLGDDKDMDCGIIKGNGTESGRIITTKKKGLNDQKDKTISYRAEHVIGTGSFGVVFQAKCLETEEKVAIKKVLQDKRYKNRELQIMRMLDHPNVVELKHSFFSTTEKDELYLNLVLEYVPETIYRASRSYTKMNQHMPLIYIQLYTYQICRAMNYLHQVVGVCHRDIKPQNLLVNNVTHEVKICDFGSAKMLIPGEPNISYICSRYYRAPELIFGATEYTSAIDMWSVGCVMAELFLGHPLFPGETSVDQLVEIIKILGTPAREEIKNMNPRYNDFKFPQIKAQPWHKIFRRQVSPEAMDLASRLLQYSPNLRCTALEACAHPFFDDLRDPRASLPNGRALPPLFDFTAQELAGASVELRHRLIPEHARK

SEQ ID NO: 4700 - protein, 299 aa, Arabidopsis thaliana
MGRTPCCDKIGLKKGPWTPEEDEVLVAHIKKNGHGSWRTLPKLAGLLRCGKSCRLRWTNYLRPDIKRGPFTADEEKLVIQLHAILGNRWAAIAAQLPGRTDNEIKNLWNTHLKKRLLSMGLDPRTHEPLPSYGLAKQAPSSPTTRHMAQWESARVEAEARLSRESMLFSPSFYSGVVKTECDHFLRIWNSEIGEAFRNLAPLDESTITSQSPCSRATSTSSALLKSSTNSWGGKEVTVAIHGSDYSPYSNDLEDDSTDSALQLLLDFPISDDDMSFLEENIDSYSQAPPIGLVSMVSKF

SEQ ID NO: 4701 - protein, 354 aa, Arabidopsis thaliana
MDRRDAMALSGSGSYYIQRGIPGSGPPPPQTQPTFHGSQGFHHFTNSISPFGSNPNPNPNPGGVSTGFVSPPLPVDSSPADSSAAAAGALVAPPSGDTSVKRKRGRPRKYGQDGGSVSLALSPSISNVSPNSNKRGRGRPPGSGKKQRLSSIGEMMPSSTGMSFTPHVIVVSIGEDIASKVISFSHQGPRAICVLSASGAVSTATLLQPAPSHGTIIYEGLFELISLSTSYLNTTDNDYPNRTGSLAVSLASPDGRVIGGGIGGPLIAASQVQVIVGSFIWAIPKGKIKKREETSEDVQDTDALENNNDNTAATSPPVPQQSQNIVQTPVGIWSTGSRSMDMHHPHMDIDLMRG

SEQ ID NO: 4702 - protein, 354 aa, Arabidopsis thaliana
MAASLVRSCCSRASRAITTVRFMSNVPEDTVYGGPKPQNSNQRVTLTQLRQKHRKGEPITMVTAYDYPSAVHIDTAGIDVCLVGDSAAMVVHGYDTTLPISLEEMLVHCRAVARGAKRPLLVGDLPFGTYESSTNQAVDTAVRVLKEGGMDAIKLEGGSPSRITAAKSIVEAGIAVMGHVGLTPQAISVLGGFRPQGKNIASAVKVVETAMALQEAGCFSVVLECVPPPVAAAATSALNIPTIGIGAGPFCSGQVLVYHDLLGMMQHPHHAKVTPKFCKQYAQVGEVINKALLEYKEEVSKHLFPGPSHSPYKISSSDLDGFLSELQKLGLDKAASDAAASAEKMDHSDSPSSQ

SEQ ID NO: 4703 - protein, 212 aa, Arabidopsis thaliana
MSTATLVVFPPPPPVPIPTYITSLGLGYSIAIALGFLVLISTIILSSYICCRASRLRFSASAANANANASFSDRGVIVPRIIFVAEDDDLESGNVVVGGLDHSVINSYPKFHFTKDITAVVNGDGFHDGEGRETTCSICLCEYMEEEMLRMMPECKHYFHVYCLDAWLKLNGSCPVCRNSPLPTPQSTPQSTPLSEVVPLSQYAADRRRSRR

SEQ ID NO: 4704 - protein, 411 aa, Arabidopsis thaliana
MEAETSWTNYPYSYITYVPEAESYREQSDDEAKVETFSMDSLLPDDLLERILSFLPIASIFRAGTVCKRWNEIVSSRRFLCNFSNNSVSQRPWYFMFTTTDDPSGYAYDPIIRKWYSFDLPCIETSNWFVASSCGLVCFMDNDCRNKIYVSNPITKQWRTLIEPPGHKSTDYTAMSTSVNRANQAVNRANRSYSVSIVKSKQVPGNFFQWDLSIHLYSSETMTWTTLVNDVLSGWRGGNESVICNNVLYFMIYSTGGSDHRHGLIASNLSSIGSPSSGILMRSFIPMPCSLTCGRLMNLRERLVIVGGIGKHDRPEVIKGIGIWVLKGKEWVEMAKMPQRFFQGFGEFDEVFASSGTDDLVYIQSYGSPALLTFDMNLKYWRWSQKCPVTKKFPLQLFTGFCFEPRLEIAP

SEQ ID NO: 4705 - protein, 241 aa, Arabidopsis thaliana
MEYVNPEGLRLDGRRFNEMRQIVAEVGVVSKADGSAVFEMGNTKVIAAVYGPREIQNKSQQKKNDHAVVLCEYSMAQFSTGDRRRQKFDRRSTELSLVIRQTMEACILTELMPHSQIDIFLQVLQADGGTRSACINAATLALADAGIPMRDLAVSCSAGYLNSTPLLDLNYVEDSAGGADVTVGILPKLDKVSLLQMDAKLPMETFETVFALASEGCKAIAERIREVLQENTKQLEYRRAA

SEQ ID NO: 4706 - protein, 649 aa, Arabidopsis thaliana
MAFNTAMASTSPAAANDVLREHIGLRRSLSGQDLVLKGGGIRRSSSDNHLCCRSGNNNNRILAVSVRPGMKTSRSVGVFSFQISSSIIPSPIKTLLFETDTSQDEQESDEIEIETEPNLDGAKKANWVERLLEIRRQWKREQKTESGNSDVAEESVDVTCGCEEEEGCIANYGSVNGDWGRESFSRLLVKVSWSEAKKLSQLAYLCNLAYTIPEIKGEDLRRNYGLKFVTSSLEKKAKAAILREKLEQDPTHVPVITSPDLESEKQSQRSASSSASAYKIAASAASYIHSCKEYDLSEPIYKSAAAAQAAASTMTAVVAAGEEEKLEAARELQSLQSSPCEWFVCDDPNTYTRCFVIQGSDSLASWKANLFFEPTKFEDTDVLVHRGIYEAAKGIYEQFLPEITEHLSRHGDRAKFQFTGHSLGGSLSLIVNLMLISRGLVSSEAMKSVVTFGSPFVFCGGEKILAELGLDESHVHCVMMHRDIVPRAFSCNYPDHVALVLKRLNGSFRTHPCLNKNKLLYSPMGKVYILQPSESVSPTHPWLPPGNALYILENSNEGYSPTALRAFLNRPHPLETLSQRAAYGSEGSVLRDHDSKNYVKAVNGVLRQHTKLIVRKARIQRRSVWPVLTSAGRGLNESLTTAEEIMTRV

SEQ ID NO: 4707 - protein, 602 aa, Arabidopsis thaliana
MASVEGDDDFGSSSSRSYQDQLYTELWKVCAGPLVEVPRAQERVFYFPQGHMEQLVASTNQGINSEEIPVFDLPPKILCRVLDVTLKAEHETDEVYAQITLQPEEDQSEPTSLDPPIVGPTKQEFHSFVKILTASDTSTHGGFSVLRKHATECLPSLDMTQATPTQELVTRDLHGFEWRFKHIFRGQPRRHLLTTGWSTFVSSKRLVAGDAFVFLRGENGDLRVGVRRLARHQSTMPTSVISSQSMHLGVLATASHAVRTTTIFVVFYKPRISQFIVGVNKYMEAIKHGFSLGTRFRMRFEGEESPERIFTGTIVGSGDLSSQWPASKWRSLQVQWDEPTTVQRPDKVSPWEIEPFLATSPISTPAQQPQSKCKRSRPIEPSVKTPAPPSFLYSLPQSQDSINASLKLFQDPSLERISGGYSSNNSFKPETPPPPTNCSYRLFGFDLTSNSPAPIPQDKQPMDTCGAAKCQEPITPTSMSEQKKQQTSRSRTKVQMQGIAVGRAVDLTLLKSYDELIDELEEMFEIQGQLLARDKWIVVFTDDEGDMMLAGDDPWNEFCKMAKKIFIYSSDEVKKMTTKLKISSSLENEEYGNESFENRSRG

SEQ ID NO: 4708 - protein, 324 aa, Arabidopsis thaliana
MDATKWTQGFQEMINVKPMEQMISSTNNNTPQQQPTFIATNTRPNATASNGGSGGNTNNTATMETRKARPQEKVNCPRCNSTNTKFCYYNNYSLTQPRYFCKGCRRYWTEGGSLRNVPVGGSSRKNKRSSTPLASPSNPKLPDLNPPILFSSQIPNKSNKDLNLLSFPVMQDHHHHGMSHFFHMPKIENNNTSSSIYASSSPVSALELLRSNGVSSRGMNTFLPGQMMDSNSVLYSSLGFPTMPDYKQSNNNLSFSIDHHQGIGHNTINSNQRAQDNNDDMNGASRVLFPFSDMKELSSTTQEKSHGNNTYWNGMFSNTGGSSW

SEQ ID NO: 4709 - protein, 220 aa, Arabidopsis thaliana
MDSRCFGFFFTLLSLNVIVLAYDPDTLQDLCVADRTSGIKVNGFTCKPESNITASDFFFAGIGKPAVVNNTVGSAVTGANVEKIAGLNTLGVSLARIDYAPGGLNPPHTHPRATEVIFVLEGELDVGFITTANKLFAKTVKKGEVFVFPRGLIHYQKNNDKAKPASVISAFNSQLPGTQSIAATLFTATPAIPDHVLTTTFQIGTKEIEKIKSKFAPKKV

SEQ ID NO: 4710 - protein, 138 aa, Arabidopsis thaliana
MEVEEAKILLGFPPNSRPDPSQVKAAYRKKVWESHPDLFPDDQKLVAESKFKSISEAYSCLESGDVKGQWYYRAGVYSRVVKTGVPRPYSSAKRGNRWLIGAPFLLIVLGTIGLGGIKANRAYNLQKQTFPSHNPFLP

SEQ ID NO: 4711 - protein, 703 aa, Arabidopsis thaliana
MEETFVPFEGIKNDLKGRLMCYKQDWTGGIKAGFRILAPTTYIFFASAIPVISFGEQLERSTDGVLTAVQTLASTAICGIIHSIIGGQPLLILGVAEPTVIMYTFMFNFAKGRPELGRNLFLAWSGWVCVWTSLILFVLAICGACSFINRFTRVAGELFGLLIAMLFMQQAIKGLVDEFRAPAREDLKLVEFLPSWRFANGMFALVLSFGLLITALRSRKARSWRYGTGWLRSLVADYGVPLMVLVWTGVSYIPTGDVPKGIPRRLFSPNPWSPGAYENWTVVKEMLQVPIVYIIGAFIPATMIAVLYYFDHSVASQLAQQKEFNLRKPSSYHYDLLLLGFLTLMCGLLGIPPSNGVIPQSPMHTKSLATLKYQLLRNRLVATARKSIKQNASLGQLYGNMQDVYNQMQTPLVYQQPQGLKELRESTIQATTFTGNLDAPVDETLFDIEKEIDDLLPIEVKEQRVSNLLQAVMVGGCVAAMPLLKMIPTSVLWGYFAFMAIESLPGNQFWERILLLFTAPSRRFKVLEDNHATFVETVPFKTIAMFTIFQTTYLLTCFGLTWIPIAGVMFPLLIMFLIPVRQYILPRFFKSAHLQDLDAAEYEEAPALPFHLAVPEAEMGSTASYPCDSEILDEFITRSRGEFRHTCSPKVTSSTSTPVYNRNLSQVFSPRVIDLRGEMSPRLSGKGQNSPKPSPLNPSSSSK

SEQ ID NO: 4712 - protein, 86 aa, Arabidopsis thaliana
MSRGKLELSMICLREVRSVLSPLKSEWECLSLTLNVVGSIFLFLWFLEISDKLPKKVGCLRNKQPLRHQNWIFVNTLFSGDTVVET

SEQ ID NO: 4713 - protein, 146 aa, Arabidopsis thaliana
MGSLQMQTSPESDNDPRYATVTDERKRKRMISNRESARRSRMRKQKQLGDLINEVTLLKNDNAKITEQVDEASKKYIEMESKNNVLRAQASELTDRLRSLNSVLEMVEEISGQALDIPEIPESMQNPWQMPCPMQPIRASADMFDC

SEQ ID NO: 4714 - protein, 361 aa, Arabidopsis thaliana
MLWIMRFSGLFSAALVIIVLSPSLQSFPPAEAIRSSHLDAYLRFPSSDPPPHRFSFRKAPVFRNAADCAAADIDSGVCNPSLVHVAITLDFEYLRGSIAAVHSILKHSSCPESVFFHFLVSETDLESLIRSTFPELKLKVYYFDPEIVRTLISTSVRQALEQPLNYARNYLADLLEPCVRRVIYLDSDLIVVDDIAKLWMTKLGSKTIGAPEYCHANFTKYFTPAFWSDERFSGAFSGRKPCYFNTGVMVMDLERWRRVGYTEVIEKWMEIQKSDRIYELGSLPPFLLVFAGEVAPIEHRWNQHGLGGDNVRGSCRDLHPGPVSLLHWSGSGKPWFRLDSRRPCPLDTLWAPYDLYGHYSR

SEQ ID NO: 4715 - protein, 140 aa, Arabidopsis thaliana
MQRANDDDNKRGFFRRLLKLVFVKLMAGAGHKEDKSVTKKLIKKESKSDITIYFKQREESEDNNANPINISRSSEKDRVIMLVNGSNGSKKNLASELNVRRSVAQTGAGGVTQPKPLLNDINTKSHAFIQSRLEKMRKGL

SEQ ID NO: 4716 - protein, 173 aa, Arabidopsis thaliana
MGASSSSSVSEKSIHQFTVKDSSGKEVDLSVYQGKVLLVVNVASKCGFTESNYTQLTELYRKYKDQGFVVLAFPCNQFLSQEPGTSEEAHQFACTRFKAEYPVFQKVRVNGQNAAPVYKFLKSKKPSFLGSRIKWNFTKFLVGKDGQVIDRYGTTVSPLSIQKDIEKALAQEL

SEQ ID NO: 4717 - protein, 535 aa, Arabidopsis thaliana
MDHSAKTTQNRVLSVKMWPPSKSTRLMLVERMTKNITTPSIFSRKYGLLSVEEAEQDAKRIEDLAFATANKHFQNEPDGDGTSAVHVYAKESSKLMLDVIKRGPQEESEVEVSKDGDVFFDISGGSRAFIEEEEARDLLRPLADPRNSYTKIRFSNRSFGSEAAKFAASVLSSIKDQLTEVDLSDFVAGRPEAEALEVMNMFSSALEGSKLRYLNLSDNALGEKGIRAFASLINSQHDLEELYLMNDGISEDAARAVRELLPSTDKIRVLQFHNNMTGDEGATAIAEIVRECPSLEDFRCSSTRIGSEGGVALAEALEHCSHLKKLDLRDNMFGVEGGIALAKTLSVLTHLTEIYMSYLNLEDEGTEALSEALLKSAPSLEVLELAGNDITVKSTGNLAACIASKQSLAKLNLSENELKDEGTILIAKAVEGHDQLVEVDLSTNMIRRAGARALAQTVVKKNTFKLLNINGNFISEEGIDEVNDMFKDCLDKLVPLDDNDPEGEDFEDEDEEEEGEDGNELESKLGSLKIKQGEE

SEQ ID NO: 4718 - protein, 263 aa, Arabidopsis thaliana
MLRNKPRAAVTTKKQTSLLMADQPPPPKPNTCHCSPSLFSSPKFRFFTSKMMMTPFDSDFSLVSPTSILEANPSIFSSKNPKPVSYFEPTIPNPQRFHSPDVFGLADLVKDGDSNRDHSRKPVNKMVLFGSKLRVQIPSSADFGTKTGIRYPPCQLSPCVQTKVLAVSEIDQTEDYTRVISHGPNPTITHIFDNSVFVEATPCSVPLPQPAMETKSTESFLSRCFTCKKNLDQKQDIYIYRGEKGFCSSECRYQEMLLDQMET

SEQ ID NO: 4719 - protein, 547 aa, Arabidopsis thaliana
MGDGNLKKSKLSWPKTLVKKWLNIKSKSEDFHADDLDRGEGGGDWRNNVIEREEACSVRKSKTETRSKRNSGRARRNKLDVDPPLDHLRVFTATWNVAGKSPPSYLNLDDWLHTSPPSDIYVLGFQEIVPLNAGNVLGTEDNGPARKWVSLIRRTLNSLPGGSCQTPSPVPHPVAELDSDFEGDSAAGANSLFYHRSRSMRMDASASSLPQQFDRRFSVCDRFMLGDTPDDFYDQSFRYCSSEDEPADSPCHDHYSPVSRTGSFVADDRDKGRDKSKYCLVASKQMVGIFLTVWVKSDLRDSVNNLKVSCVGRGLMGYLGNKGSISISMSVHQTSFCFVCSHLTSGQKEGDELRRNSDVLEILRKTRFPRVNNAGDDKSPQMISEHDRVIWLGDLNYRIALSYRSAKALVEMRDWRALLEKDQLRIEQRKGCVFEGWKEGTIYFPPTYKYSNNSDIYAGDDRLPKAKRRTPAWCDRILWHGSGISQLSYVRGESRFSDHRPVYSLFSVEIESAYRNRIKKSSSYTSSRIEVEELLPQRYGYSELNPY

SEQ ID NO: 4720 - protein, 333 aa, Arabidopsis thaliana
MTGNSFNSMKDFLKQTGGYAVIDGGLATEFERHGADLNDPLWSAKCLVTSPHLIHTVHLDYLEAGADIISSASYQATIQGFEAKGFSREESESLLKKSVEIATEARNSYYDKCGTSSSMDDKILKKRPILVAASVGSYGAYLADGSEYSGIYGDSITLEKLKDFHRRRLQVLAESGADLIAFETIPNKIEAQAFADLLEEGDVKIPGWFSFNSKDGVNVVSGDSIKECISIAENCEKVVAVGINCTPPRFIEGLVLEIEKVTSKPILVYPNSGESYDADRKEWVENTGVGDEDFVSYVEKWMDAGVSLLGGCCRTTPTTIRAIHKRLVNRRSL

SEQ ID NO: 4721 - protein, 406 aa, Arabidopsis thaliana
MDVYEATRIVLSRIQNLDPANASKIIGLLLLQDHGEKEMIRLAFGPQNLLHSVIAKAKKDLEERLSFLTPRTAEDFESDLGFGWGHRKEVLRSNSVPPRLANQFTGYPFSPKGVNLQQSEAQRAAALMMGDDLHKLGIWRPERIDLSATACPASRQIYLTFPADSIFREEDVSDYFSTFGPVQDVRIPYQQKRMFGFVTFMYPETVKSILAKGNPHFVCHSRVLVKPYKEKGKVPDKYRTKPSRDIMDFQLGGRAFHEDLLWKRRFEERALELQSTRLMNLQLLDVEKQFQLNFDQTLLVSPRLVSNNQRVCTKENDEDTIKLPESLEDDRLVDSPIVSPKHHFLECGVAAETKGSGLSSPSFDQDESSTGTLKEPLKSLKCQMPRLSMMGITQGSSGPTTCRVGI

SEQ ID NO: 4722 - protein, 236 aa, Arabidopsis thaliana
MAKIKPQALLNQSKKKKGPSRISISTIIVCNLVVAVVILSLVTTYRHWSQRSRNTIEHETRSQRFEDTNTASGQKTYDLPGFADINTSKGLITVELFKEGSPEVVDKFLDLCQKDHFKGMPFQRVIKNYLVQAGHSPSSIPVEEWTAKGKLRGRLHIGPKHEAFMLGTPKNKGNNKDFELLITTAPIPDLNDQLIVFGRVLKGEDVVQEIEEVDTDEHFQPKSPIGITGVVLKLET

SEQ ID NO: 4723 - protein, 430 aa, Arabidopsis thaliana
MKQMSHLDDIPSTPGKFKPYFHRTRWQSSVAKLAFWSLVFVGLIFIFFYRSPVSSNPADPSRRSLRTYSWGGPAWEKRVRSSARLRTRRGFSVLVTGAAGFVGTHVSAALKRRGDGVLGLDNFNDYYDPSLKRARQALLERSGVFVVEGDINDAALLKKLFEVVPFTHVMHLAAQAGVRYAMENPSSYVHSNIAGFVNLLEVCKSANPQPAIVWASSSSVYGLNTKVPFSEKDRTDQPASLYAATKKAGEEIAHTYNHIYGLSLTGLRFFTVYGPWGRPDMAYFFFTRDILKGKAISIFEGVNHGTVARDFTYIDDIVKGCLGALDTAEKSTGSGGKKRGAAQLRVFNLGNTSPVPVTDLVTILERLLKVKAKRNIMKLPRNGDVQFTHANISSAQRELGYKPTTDLQTGLKKFARWYLGYYNGGKKAAS

SEQ ID NO: 4724 - protein, 194 aa, Arabidopsis thaliana
MMRLRRLLERMLRRCCFRDCSVRLTKSLCFKKLIEFDATKNQIVTKLQRLKKKFNNAVKNARKKGQTEDEVEYAKESEKKRFDLSIMIWGSNGVLVAGKSSKKKVAPKEMKPEETDAKVVNEGLSIGREMVPFGSSCGLDESKLTTGWENVEDGAEKREVEEKWKKFKDKLFELLYERSVLMNKTEAMMFKAES

SEQ ID NO: 4725 - protein, 240 aa, Arabidopsis thaliana
MSSMSMSSSSAPAFPPDHFSSTDQLCYVHCSFCDTVLAVSVPPSSLFKTVTVRCGHCSNLLSVTVSMRALLLPSVSNLGHSFLPPPPPPPPPNLLEEMRSGGQNINMNMMMSHHASAHHPNEHLVMATRNGRSVDHLQEMPRPPPANRPPEKRQRVPSAYNRFIKEEIQRIKAGNPDISHREAFSAAAKNWAHFPHIHFGLMADHPPTKKANVRQQEGEDGMMGREGFYGSAANVGVAHN

SEQ ID NO: 4726 - protein, 364 aa, Arabidopsis thaliana
MTKKLDPPTAPSSDEDDVETSEDDSSSSEEDEPIKSLPATTAAAPAKSTAVSAATPAKSTSVSAAAPSKSTAVSAAADSDSGSESETDSDSESTDPPKSGSGKTIASKKKDDPSSSTATLALPAVKSGAKRAASEAATTSTKRVKKDEESVKKPALFQRLWSDDDEISMLQGMIDYHADTGKSPSADTNAFYEFQKKSISFEVSKSQFSDKVRSLRKKYRAKEGKDEPRFVKAHDKKAFELSKFIWGPKGIALDSNAKSNGVSKKSASKTKEKLDSVKQDLAFVGVSSTNGDDWFEKSSLARMIAGSGIDEYYVRQKWSSFTLETKKIVEEKFQLMQAKELEAMLDKSVRLTDLTSYFVDASKN

SEQ ID NO: 4727 - protein, 835 aa, Arabidopsis thaliana
MAKKTQRRAAARQEREQLGCMWGFMNMFSFRHGPLAHKLLLDQKHASGNPKNNELNKSKFREKDAQETHVGEERNITITIIKPSVKKLIAEELSIDKEIKKQRENAEAGQLSDSELEGRRRKNQRRKNKTRKKSCDNFSHMNLVDSEEPLVQRRNRRSARSVDIDNMIEEFYSEIHRRSTSHAKNDEDYKEKLRELVKFLISQKLLHGNRPRGNSEILTSKDLMEVFQILGSDEELFLKLLQDPEILVPREKGAESLSLVESEQSSLADKKWSSFFRRKDEPQEECEASDRIFILKPRSASFSSPDIGNSRGSSPDSHLMGNKLQNERNSSHYFLSEIKRKLKHAIKKEQPAGGFGEGFPKTKDHFFLERMAKPSTSQKKSHSEDDKKQRVSNIYTEAKKHLSEMLNNGDLDSKSTSRQVQRSLGRILSFPEYLSPLNSPGRRWEKSSTAHKKSASADFINLVNIKKETHASQPEENTDIQVCNLSKEPDDSIQPIASEPNEKSVDIEDETANEDNMFSAGSADDVMIPNELDEVPEEASSTLIGDLSKVEAQDEQRDSINSKQTSLEESQPPLSSSVASPSHCLAQTEECKSAITDFPEWSSPISVLEPLFVEDDISPAKMRSQSGEAEVQPWCIHFDEKDPAPTYRENSVTSDKELVFKYVKAVLDAVDSDIEELYLKAQFSDQLLEPALISNIPFCPNQLCPDHELLFDCINEALMELCCCPPWASFVTPRTRVFSTVKSIIHEVQEAVYWHLLPLPLPHALDQIVRKDMARAGNWLDIRCDIDCIGFETSELILNELLEELILNNTEHSLVSPELKTDGSILILESTEPCR

SEQ ID NO: 4728 - protein, 460 aa, Arabidopsis thaliana
MSILCCVPVLECVYCLGCTHWLWKKCLYSAGHESENWGLATSDEFEPIPRICRLILAVYEENLHDPMWAPPDGYGIDPNHVILKKDYDQTEGRVTPYMIYLDHENGDVVLAIRGLNLAKECDYAVLLDNKLGQTKFDGGYVHNGLLKAAMWVFEEEHVVLRELLEANPSYSLTFVGHSLGAGVVSLLVLFVIQNRVRLGNIERKRIRCFAIAPPRCMSLHLAVTYADVINSVVLQDDFLPRTTTALENVFKSIICLPCLLCLTCLKDTFTFEERKLKDARRLYAPGRLYHIVVRKPLRLGRYPPVVRTAVPVDGRFEQIVLSCNATADHAIIWIERESQRALDLMVEEDQVMQIPVEQKIVRQKSIVEDHDEEYRAAIMKAASLNIPMSPSPSYGTFHDTEEGESSAGSGMEGSPSGWSFKGMRRKWDQFIDCHFPVNDNSEHMIFKNQESQALLCGQET

SEQ ID NO: 4729 - protein, 473 aa, Arabidopsis thaliana
MTNQQEQHIAIFTTASIPWLTGTAVNPLFRAAYLANDGERRVTLVIPWLTLKHQKLVYPNSITFSSPSEQEAYVRQWLEERVSFRLAFEIRFYPGKFAIDKRSILPVGDISDAIPDEEADIAVLEEPEHLTWFHHGQKWKTKFNYVIGIVHTNYLEYVKREKQGRVKAFFLKYLNSWVVGIYCHKVIRLSAATQEYPKSIVCNVHGVNPKFLEIGLRKLEQQKLQEQPFTKGAYYIGKMVWSKGYKELLKLLEKHQKELAELEVDLYGDGEDSEEIKEAARKLDLTVNVYPGRDHADSLFHNYKVFLNPSTTDVVCTTTAEALAMGKIVVCANHISNKFFKQFPNCRTYDDGQGFVRATLKALGEQPSQLTEQQRHELSWEAATQRFIKVSDLNRLSRADSNLSKRSVFASSSISVGKNLEDMSAYIHFLASGFEASRTAFGAIPGSLQPDEELCRDLGLSLNTPSPNTRKQD

SEQ ID NO: 4730 - protein, 489 aa, Arabidopsis thaliana
MGGQCSSLSCCRNTSHKTAVLEAPDVDNGESSEITDVPNFREYTLEQLKAATSGFAVEYIVSEHGEKAPNVVYKGKLENQKKIAVKRFTRMAWPDSRQFLEEARSVGQLRSERMANLLGCCCEGDERLLVAEFMPNETLAKHLFHWETQPMKWTMRLRVVLYLAQALEYCTSKGRTLYHDLNAYRVLFDEECNPRLSTFGLMKNSRDGKSYSTNLAFTPPEYLRTGRITPESVIYSFGTLLLDLLSGKHIPPSHALDLIRDRNLQTLTDSCLDGQFSDSDGTELVRLASRCLQYEARERPNTKSLVTALTPLQKETEVLSHVLMGLPHSGSVSPLSPLGEACSRRDLTAMLEILEKLGYKDDEGVTNELSFHMWTDQMQESLNSKKKGDVAFRQKDFREAIECYTQFIDGGMISPTVCARRSLCYLMSDMPKEALDDAIQAQVISPVWHVASYLQSASLGILGMEKESQIALKEGSNLEAKMNGVPRVK

SEQ ID NO: 4731 - protein, 802 aa, Arabidopsis thaliana
MNFGSLFDNTPGGGSTGARLLSGLSYGNHTAATNVLPGGAMAQAAAAASLFSPPLTKSVYASSGLSLALEQPERGTNRGEASMRNNNNVGGGGDTFDGSVNRRSREEEHESRSGSDNVEGISGEDQDAADKPPRKKRYHRHTPQQIQELESMFKECPHPDEKQRLELSKRLCLETRQVKFWFQNRRTQMKTQLERHENALLRQENDKLRAENMSIREAMRNPICTNCGGPAMLGDVSLEEHHLRIENARLKDELDRVCNLTGKFLGHHHNHHYNSSLELAVGTNNNGGHFAFPPDFGGGGGCLPPQQQQSTVINGIDQKSVLLELALTAMDELVKLAQSEEPLWVKSLDGERDELNQDEYMRTFSSTKPTGLATEASRTSGMVIINSLALVETLMDSNRWTEMFPCNVARATTTDVISGGMAGTINGALQLMNAELQVLSPLVPVRNVNFLRFCKQHAEGVWAVVDVSIDPVRENSGGAPVIRRLPSGCVVQDVSNGYSKVTWVEHAEYDENQIHQLYRPLLRSGLGFGSQRWLATLQRQCECLAILISSSVTSHDNTSITPGGRKSMLKLAQRMTFNFCSGISAPSVHNWSKLTVGNVDPDVRVMTRKSVDDPGEPPGIVLSAATSVWLPAAPQRLYDFLRNERMRCEWDILSNGGPMQEMAHITKGQDQGVSLLRSNAMNANQSSMLILQETCIDASGALVVYAPVDIPAMHVVMNGGDSSYVALLPSGFAVLPDGGIDGGGSGDGDQRPVGGGSLLTVAFQILVNNLPTAKLTVESVETVNNLISCTVQKIRAALQCES

SEQ ID NO: 4732 - protein, 252 aa, Arabidopsis thaliana
MVMISYKLNLVLIIILIGGSFNDLRVSSAAANLTETCNGICGGLTLSYPFGFSLGCPIQFNCSAAGQGAKIGEFPVQNVTENSILVGVPTNCTRKIEDMTPLFGKQFTPSSENSFLMENCVNPTNGCSINQRFLDKQLKSCESTGNISCFPSDTSSKSSEFLSMKELTNSSCRLLYTSIALESVGVNVGIAVEFERVRLGWWLMGGCENGTCVVNANCTDVYTPDGYAGHRCSCLEGYHGDGYINPCLKLRG

SEQ ID NO: 4733 - protein, 714 aa, Arabidopsis thaliana
MRSRGDVSEAEGTRSDAGSSRSEEETSLKEKHSNSRAGSQRSGKSLRNDEPNYGSDSSSKNTSSSNNPIEYTEHERAELLRRLDSIKDHLLRGGGGGNNVVDKPKEPDQNQPFLRPVHLHGHANHNPGPSYYHQYPEPIQYPGPVHGMYPQAYQDPYGYQRRPPPVPNPNWYPPGHYPNQMARQYPGGQYVELGPDIVEPHSYYPATPGRYGDLPPYSPVSSHHREEKLATQYSDMPPYSPVSSHHRGEKLTTPYSPRVNNGSSFPSSMGTPGPRGGYARWPSEHDSEMGGAFARGYVKKAVSDTGVRRCHPLAGGAPFIACHSCFELLYLPKKKLLSQERLHKLQCGACSEVISFTIVDRKLVFSSGNEETKPVSLEVEDRNTTNTVVIEEEVSSVDFNSSGRDIPRKDEEEPVQELRNHQDTITTQSVRSESQHSDDEERSSNSSEQQQKEVKSVRRRGKGSKAPEPAAPDNASLLELFEYSNVNRAALAYGMAQLGYEKPDKQKSFMTQDSLKPESVATETEVSYNGYSNTEISEDSRYSNRKGSEYGSTEITTRSSTDQNEDQMKSLEVWVNGHLIPEDLVSSAEKLAGPIQAGKYWYDYRAGFWGVMGKPCLGIIPPFIEEFSHPMLDNCAAGNTDVFVNGRELHKRDFELLVGRGLPRDKNRSYIVDISGRILDQDSGEELHSLGKLAPTIEKVKHGFGMRVPRSLAS

SEQ ID NO: 4734 - protein, 1031 aa, Arabidopsis thaliana
MGSLESGIPTKRDNGGVRGGRQQQQQQQQQQFFLQRNRSRLSRFFLLKSFNYLLWISIICVFFFFAVLFQMFLPGLVIDKSDKPWISKEILPPDLVGFREKGFLDFGDDVRIEPTKLLMKFQRDAHGFNFTSSSLNTTLQRFGFRKPKLALVFGDLLADPEQVLMVSLSKALQEVGYAIEVYSLEDGPVNSIWQKMGVPVTILKPNQESSCVIDWLSYDGIIVNSLRARSMFTCFMQEPFKSLPLIWVINEETLAVRSRQYNSTGQTELLTDWKKIFSRASVVVFHNYLLPILYTEFDAGNFYVIPGSPEEVCKAKNLEFPPQKDDVVISIVGSQFLYKGQWLEHALLLQALRPLFSGNYLESDNSHLKIIVLGGETASNYSVAIETISQNLTYPKEAVKHVRVAGNVDKILESSDLVIYGSFLEEQSFPEILMKAMSLGKPIVAPDLFNIRKYVDDRVTGYLFPKQNLKVLSQVVLEVITEGKISPLAQKIAMMGKTTVKNMMARETIEGYAALLENMLKFSSEVASPKDVQKVPPELREEWSWHPFEAFMDTSPNNRIARSYEFLAKVEGHWNYTPGEAMKFGAVNDDSFVYEIWEEERYLQMMNSKKRREDEELKSRVLQYRGTWEDVYKSAKRADRSKNDLHERDEGELLRTGQPLCIYEPYFGEGTWSFLHQDPLYRGVGLSVKGRRPRMDDVDASSRLPLFNNPYYRDALGDFGAFFAISNKIDRLHKNSWIGFQSWRATARKESLSKIAEDALLNAIQTRKHGDALYFWVRMDKDPRNPLQKPFWSFCDAINAGNCRFAYNETLKKMYSIKNLDSLPPMPEDGDTWSVMQSWALPTRSFLEFVMFSRMFVDSLDAQIYEEHHRTNRCYLSLTKDKHCYSRVLELLVNVWAYHSARRIVYIDPETGLMQEQHKQKNRRGKMWVKWFDYTTLKTMDEDLAEEADSDRRVGHWLWPWTGEIVWRGTLEKEKQKKNLEKEEKKKKSRDKLSRMRSRSGRQKVIGKYVKPPPENETVTGNSTLLNVVDA

SEQ ID NO: 4735 - protein, 991 aa, Arabidopsis thaliana
MMSIANEQQFAMDQLVETNDDSEKKPRITYTRKFLISLSEKDVCKKLPNLPGEFDEALLLDFEDPSPERARISGDFSSHGFRRNDYSSSPPTRGELGTNSRGTHGRWEGRSGGWNDKDSDSQSDRDSGEPGRRSGMPSRRSWQAPEHDGLLGKGSFPKPSGFGAGTSAPRPQSNDSHQLSRTNEPYHPPRPYKAPPFTRRDARDSFNDETFGSSDSTSEDRAEEERKRRASFELLRKEHQKAFQERQKSNPDLRKNDFDFTELLGESKDDKGRPSRSDEVNHAPTIPGSSNTSLPSQSNAPRPLVPPGFASTILEKKQGEKPQTETSQYERSPLNSKGINVVNGTSVNNGGKPLGIKIGSSEMLIEGEDVRVSSTDANERAVNISSLLGISTDTVNKDKSFEKLSSISTPTEIQGYPIKSEKATMTLGKKKSLEHSDGPSILDKIFNTAINLNSGDSSNMNKKNVEKVEEIRSPQTINKSSKFAHLFLEEDNKPVEVLPSSEPPRGLLSLLQGADKLQTFDTKANPDLSTDFPFQGHATKRTDQLSSTSTTKSVTAVPPVLTCEDLEQSILSEVGDSYHPPPPPVDQDTSVPSVKMTKQRKTSVDDQASQHLLSLLQRSSDPKSQDTQLLSATERRPPPPSMKTTTPPPSVKSTTAGEADPGKSLTLENLFGSAFMNELQSIGEPVSGRAMVSDAPGVPLRSERSIGELSQRNQIRPDGPPGGVLALPEDGNLLAVGGHANPSKYMSFPGSHNQEPEVAFNISDKLAALNSGPRNERPTMGGQDGLFLHQHPQQYVTNPSSHLNGSGPVFHPFDSQHAHVKPQLDFMGPGSTMSQHHDPPPNHRFPPNMIHRPPFHHTPTSGHPEFDRLPPHMMQKMHMQDNLQHHHLMQGFPGSGPQPHHSPHVNNQMPGLIPELNPSQGFPFAHRQPNYGMPPPGSQVNRGEHPASLQTLLGIQQRMDPAKQIPAVGQAGGPNRQGSVGHELDLGFGYR

SEQ ID NO: 4736 - protein, 725 aa, Arabidopsis thaliana
MSIFSLASSSDSQRDDLIMALKAVVIVYCVVSLVSVQLADAQHEGLPVSPTLSPSTSPVITDLPLPAEFPRFHRKYFAPQQAEAPQHSPPYSRLVASDHPPTSSHFSKPSMKRNAQSPGAGLADIAPAQSSNGVLPDALTQPPLSPSISNCCKSDMVLKRRSIGCHCVYPIKLDILLLNVSETPSWNMFLNEFATQLGLLPHQIELINFYVLSLSRMNISMDITPHSGISFSASQASAINSSLISHKIQFSPTLVGDYKLLNLTWFEAPAPSQAPLVASSPHKAPSQGSSATTSVRSPGKKRHPNLILIFSIAAGVLILAIITVLVICSRALREEKAPDPHKEAVKPRNLDAGSFGGSLPHPASTRFLSYEELKEATSNFESASILGEGGFGKVYRGILADGTAVAIKKLTSGGPQGDKEFQVEIDMLSRLHHRNLVKLVGYYSSRDSSQHLLCYELVPNGSLEAWLHGPLGLNCPLDWDTRMKIALDAARGLAYLHEDSQPSVIHRDFKASNILLENNFNAKVADFGLAKQAPEGRGNHLSTRVMGTFGYVAPEYAMTGHLLVKSDVYSYGVVLLELLTGRKPVDMSQPSGQENLVTWTRPVLRDKDRLEELVDSRLEGKYPKEDFIRVCTIAAACVAPEASQRPTMGEVVQSLKMVQRVVEYQDPVLNTSNKARPNRRQSSATFESEVTSSMFSSGPYSGLSAFDHENITRTTVFSEDLHEGR

SEQ ID NO: 4737 - protein, 112 aa, Arabidopsis thaliana
MLSSPAFAAARSTLGRRLHAKRLSSSTGRTADPEIHARNDGDEPSLFPSDPEGLDDVANPKTPADEDVPDIRPPGFVKEPLSPPKNPRDTSHKLESTPVGLPADLNFQQKRN

SEQ ID NO: 4738 - protein, 171 aa, Arabidopsis thaliana
MADSSQKKIRRNAITHKAWSLMKMALLWGRKGGVFKKWPLFELRSLFFKHLKALAHHHSNGDRYYGERQLSFDETPLFNVKKKMHCPTSSMRFLLLPCFAPPVDFDYDFEMDGQDYSDEVQSYGYDESCSEEEKGVDVRAEEFIAKFYEQIKLQRQVSYLKYKQHNDAVLL

SEQ ID NO: 4739 - protein, 322 aa, Arabidopsis thaliana
MLWYNDMHRILREPGMDQYGIPVERKEMKHKGRNVIWSVGMDKCLIEALAVQAKNGNKVDKCFNDKAYTAACVAVNTRFNLNLTSQKAINRLKTIKKRYRVMRDILSRDGFWWNSSTKMIDCESDELWRRYIAVNPDAKAFRGKQIEMYEELRTVCGDYQTPGKYNKVKKESSHHLNDVKQFEEDSVSFPLGSSEEHSDTDGTESYAGASEYMHEESQDLPPPRDPLRRPSKRSRNSDPCQEAMLVVASSIRRLADAVVQSKTLINTEELLKAVMEIDELEEAKQMYAFEYLNGDPVKARAFMAYNNRMRKMFLFRQFWWWK

SEQ ID NO: 4740 - protein, 738 aa, Arabidopsis thaliana
MERKTIDLEQGWDYMQTGITKLKRILEGLNEPAFDSEQYMMLYTTIYNMCTQKPPHDYSQQLYDKYREAFEEYINSTVLPALREKHDEFMLRELFKRWSNHKVMVRWLSRFFYYLDRYFIARRSLPPLNEVGLTCFRDLVYNELHSKVKQAVIALVDKEREGEQIDRALLKNVLDIYVEIGMGQMERYEEDFESFMLQDTSSYYSRKASSWIQEDSCPDYMLKSEECLKKERERVAHYLHSSSEPKLVEKVQHELLVVFASQLLEKEHSGCRALLRDDKVDDLSRMYRLYHKILRGLEPVANIFKQHVTAEGNALVQQAEDTATNQVANTASVQEQVLIRKVIELHDKYMVYVTECFQNHTLFHKALKEAFEIFCNKTVAGSSSAELLATFCDNILKKGGSEKLSDEAIEDTLEKVVKLLAYISDKDLFAEFYRKKLARRLLFDRSANDDHERSILTKLKQQCGGQFTSKMEGMVTDLTLARENQNSFEDYLGSNPAANPGIDLTVTVLTTGFWPSYKSFDINLPSEMIKCVEVFKGFYETKTKHRKLTWIYSLGTCHINGKFDQKAIELIVSTYQAAVLLLFNTTDKLSYTEILAQLNLSHEDLVRLLHSLSCAKYKILLKEPNTKTVSQNDAFEFNSKFTDRMRRIKIPLPPVDERKKVVEDVDKDRRYAIDAAIVRIMKSRKVLGHQQLVSECVEQLSRMFKPDIKAIKKRMEDLITRDYLERDKENPNMFRYLA

SEQ ID NO: 4741 - protein, 1111 aa, Arabidopsis thaliana
MEIAAKSNSKRMYSWWWDSHNTPKNSKWLQDNLADMDSNVKQMIKVLEEDADSFARRAEMYYRKRPELMKLVEEFYRAYRALAERYNHATGVIHKAHETIAEAFPNQVPLIFGDESHGGALTNDVDPQTPDMPPPFRARGNPDEFQQDALGFSLSHVHDVKRNIDFSEEPLFVSNGKARKGLNFNDHGDGKGRNGLKDHILSESERASKAEAEVVALKDSLSKMQAEKQASLALFEKNLERLSNLESEVSRAQADSRGINDRAASAEAEIQTLRETLYKLESEKESSFLQYHKCLQKIADLEDGLSVAHKEAGERASKAETETLALKRSLAKAETDKETALIQYRQCLNTISNLEERLRKAEEDARLINERAEKAGVEVENLKQTVSKLIKDKEASELQFQQCLNIIASLKVKLHHAQEETQSLSHEIEDGVAKLKFSEEKCLLLERSNQNLHSELDSLLEKLGNQSQKLTEKQTELVKLWSCVQAEHLHFQEAETAFQTLQQLHSQSQEELNNLAVELQTVSQIMKDMEMRNNELHEELEQAKVENKGLNDLNFTMEKLVQKNLMLEKSISYLNSELESFRRKLKTFEEACQSLSEEKSCLISENQHNVIENTVLIEWLRQLRLEAVGIATEKTDLEGKAKTIGDKLTDAETENLQLKRNLLSIRSEKHHLEDEITNVKDQLHEKEKEFEEIKMEKEKLIQEVFKERKQVELWESQAATFFCDKQISVVHETLIEATTRELAEACKNLESKSASRDADIEKLKRSQTIVLLNESIKSLEDYVFTHRESAGEVSKGADLMDEFLKLEGMCLRIKAIAEAIMEKEKFLMLENTNTYSMLEASLKQIKELKTGGGRSMRKQDGGSGRMRKQSHETEMVMKDIVLDQTSDGSSYEIVSKKGNSELDHLGFVELKPVKTHKTETKALSEESLIVEKVEIFDGFMDPNREVNKRRVLERLDSDLQKLENLQITVEDLKSKVETVEKEKTKVGENEYKTIKGQLEEGEEAIEKLFTVNRKLTTKAESEKDIDRRRRIFEHARRGTEKIGRLQSEIQRIQFLLMKLEGEREHRLRSKISDTKVLLRDYIYGRTRSVSMKKRTKKRSVFCGCVQQPESP

SEQ ID NO: 4742 - protein, 551 aa, Arabidopsis thaliana
MDAPNPKRPCLVPLGTSSIENPCSLPIAPDFNQSNIDLTISSFLSLSDLPLFSLPLSIGCSFDRVLDNVIPSIAGTSRDEFDQDRFLDRTLQLASLLYKSTKRCIRKRATLQNSTSWPLLPELTIKVFSMLDTKSLMQASACCTMFNKCAMDRVCYSHIDLTTAAEDVDNGVVCVMIHRAGKELRSLKLGSISSSAEPTTSLLTRSCLTPLTFNHGFTGGHLRSLHLYHLRMIDCGSLSPVLSACLNLTDLKIVGLISGSRDNPLEQLGLLTRNCRLIEHLFIEIYGAAGLITDSSLLEFAANCPNLSSISLLGFLLNDAILQKLIKGFRRLKHINLSSSPEISGCFFRGLELCGKDSPLETLILRDCYILKESEVLLFLNSLLAGDFKYIRLIDVSNVDGLVCDGGNRTFEPRFPIEELKKQRSNVTFVAIFESQSSLSSSSSGEVYSDGTSSWTSNYNSAEEEHDNDLDSHPSGKRCSKPKFPLEELNKERPGLTFVAEFRSPSPSESDVRSPSPSSSSDSSSSSDSSSSSSSGESSDESGTEEEEDED

SEQ ID NO: 4743 - protein, 814 aa, Arabidopsis thaliana
MVEKQEEMNEFGAVNGGKVGTSSSVSPPQDKGRKNKRKLADPSPQNAASLTEFPRYELHSFKSQSPLCENDSNGQLKAEESDSVGWDDPFACHLEGLLSSNLLTLFRSAMNQIMDCGYSEDVVLKAISSSRFYCGGTDLVSNIVNDTLSFLKSGKKVAGSRDYVFEDLQQLVAYSLVEKISLVREVRPSLSTDEAMWRLLICDLNVLKAFEVDADGLEGSSVSNASKSSESPVAECNPPKSSDADNPKAPVSNTQSKQSEPVKFGNFANVNNSKNPHASGATPGKEVFSVSTASGEGTKSASLTSVSDEKLVSCRKGRTKKEMAMLRQKSCVEKIRTYSKGGGYKTAKFGGFLVEKRGKSASDLLSAQARNSSSKITTEVMKIPLAESSSTLSNSTKSDSPALDVKEHVTALPANNAPAPVASEKKSGSEPEEKPSVSTKPAPDYYAAIPYDATLGIYIPRNKRDELILKLVPRMKDLQKELQDWTDWANQKVKQATVRLLKDQPELKALRKEKEEAEEFRKEKQLLEENTIKRRSEMELALNNATNQLERTNNTIRRLELEQSLLKREREAANIRASESAESCREAKERVQRLLKNSQSWEGQKNLLQEELKSQRDKVAGLQQEVAKAKTRQNQIEATWKQEKSATGKLTAQAAALKKERGKLEELGKAEEERIKTKAENDVKYYIENIKRLDTEISKLKLKSDSLKIAALKKGIDGNNDGNKSGMNHTTNTKANSMASAKVWENNQGAESKIKRERECVMCLSEEMSVIFLPCAHQVLCSKCNQLHEKEAMEDCPSCRAKIQRRIQARFARG

SEQ ID NO: 4744 - protein, 913 aa, Arabidopsis thaliana
MVRLLQPKHMVQAVNALHWRNSVEFHKLLKDNGDFSICFNSEQVLPQKISVEKMVKMLPRHLIAVVMTPNKDGKSRYILCGIRLLQTLCDLTPRNAKLEQVLLDDVKLSAQMIDLVILVIIALGRNRKESCNSNKESLLEATLVASCLHLFHGFISPNSQDLVLVLLAHPRVDVFIDSAFGAVLNVVISLKAKLLYRQTDSPKKLGASSVEEVNFHCQQAEAALQFLHSLCQHKPFRERVAKNKELCGKGGVLRLAQSILSLTITPEFVGATVTIASTSRMKAKVLSILQHLFEAESVSFLDEVANAGNLHLAKTVASEVLKLLRLGLSKASMATASPDYPMGFVLLNAMRLADVLTDDSNFRSFFTEHFSMVLSAVFCLSHGDFLSMLCSSDLSSREDDANVDYDLFKSAGWILSVFSSSGQSVTPQFKLSLQNNLTMSSYAHQRTSLFIKMIANLHCFVPNVCQEQDRNRFIQNVMSGLRKDPSSILIKMLPGSSYTPVAQRGTGVCRNLGSLLRHAESLIPSSLNEEDFLLLRVFCDQLQPLIHSEFEESQVQVKVKKLFALLYIGFTILWLICLVTLIQDIEGRGGNLSGKLKELLNLNNEEASEDCDVRVEGVMTKQGVNEEIDTVERLKESDADASNLETSGSDTSSNRGKGLVEEGELVQNMSKRFKGSASGEVKEDEKSETFLVFEKQKKKRKRSIMNADQMGMIEKALAEEPDLQRNSASRQLWADKISQKGSEVITSSQLKNWLNNRKAKLARANKQTGPAHDNNSSGDLPESPGDENTWQQKPSTPIKDQTVTETPKTGENLMRTSSSSEEGIKQGQQVRLMDERGDEIGKGTVLRTDGEWNGLSLETRQICVVDVMELSESYDGSKKMIPYGSDDVGRTFTEANSRFGVMRVAWDVNKLQY

SEQ ID NO: 4745 - protein, 818 aa, Arabidopsis thaliana
MLMKSLHLLSSSILLHRFASRSIASLSTLPRRRNIVRIHNPSFSSPFPPILSRPISSGKVLAMAEESSSSSTSSTSQKHTNRLAAEHSPYLLQHAHNPVDWYPWGEEAFEEARKRDVPIFLSIGYSTCHWCHVMEVESFEDEEVAKLLNNSFVSIKVDREERPDVDKVYMSFVQALYGGGGWPLSVFLSPDLKPLMGGTYFPPNDNYGRPGFKTLLKKVKDAWNSKRDTLVKSGTYAIEELSKALSASTGADKLSDGISREAVSTCAKQLSRSYDSEFGGFGSAPKFPRPVEIQLMLYHYKKLKESGKTSEADEEKSMVLFSLQGMANGGMHDHIGGGFHRYSVDECWHVPHFEKMLYDQGQLANVYLDGFSITKDVMYSYVARDILDYLRRDMIAPEGGIFSAEDADSFEFEGAKRKKEGAFYIWTSDEIDEVLGENADLFKEHYYVKKSGNCDLSSRSDPHNEFAGKNVLIERNETSAMASKFSLSVEKYQEILGECRRKLFDVRLKRPKPHLDDKIIVSWNGLVISSFARASKILKAEPESTKYYFPVVNSQPEDYIEVAEKAALFIRGNLYDEQSRRLQHSYRQGPSKAPAFLDDYAFLISGLLDLYENGGGIEWLKWAIKLQETQDELYLDREGGAYFNTEGQDPSVLLRVKEDHDGAEPSGNSVSAINLVRLASIVAGEKAESYLNTAHRLLAVFELRLRELAVAVPLMCCSADMISVPSRKQVVLVGSKSSPELTNMLSAAHSVYDPNKTVIHIDPSSSDEIEFWEEHNSNVAEMAKKNRNSEKVVALVCQHFTCSPPVFDSSSLTRLLSK

SEQ ID NO: 4746 - protein, 240 aa, Arabidopsis thaliana
MASHSSTLFTSPSSFILFSSHRLKSSPNYFTYHFPRSVKRPHFDLRCSVSIEKEVPETERPFTFLRVSDGDQTQSSSYSVRARFEKMIRTAQDKVCEAIEAVEEGPKFKEDVWSRPGGGGGISRILQDGNVWEKAGVNVSVIYGVMPPEAYRAAKAATSEQKPGPIPFFAAGTSSVLHPQNPFAPTLHFNYRYFETDAPKDVPGAPRQWWFGGGTDFTPAYIFEEDVKHFHSVVKPDPLF

SEQ ID NO: 4747 - protein, 677 aa, Arabidopsis thaliana
MVRFSCFNAHIHRHRPKKSVEGFSERVIKEDGSKSKGLSSIIFGRNIASVSENSKPAAVERVWKSEEIKPSGILEHGIGTHQVLHLKKSQSHGNELYLDGRDATENGTDDASDRITSPNSLEQQSGIHEAGSSKRVDESPNLYQQGPRASVSAYQGSNQALCGSIFSVGDLHHTDKDSRQLDDTSLYGEQMDNSNSQTPHDSPLMVRSNSLPNIADSSSEKSSPFKYSSHHSRSSDDLHALDTRQTDKSVHETDEEVKQEEDQDRDYDMHNSGDNNKENLVEDGYDDSYDYSSLAKDWIVPPTDELKLSKFLEGETTNQQAEFSGKDSKFKRIEDWVNDLQHVNLSEEADEITGYDDELPREPVVLNEQATSSAKVDAIKLTPGMEAAKKYISSLSASATTAQLVSHGLVVIPFLSAFVGLRVLNLSGNAIVRITAGALPRGLHALNLSKNSISVIEGLRELTRLRVLDLSYNRILRLGHGLASCSSLKELYLAGNKISEIEGLHRLLKLTVLDLRFNKFSTTKCLGQLAANYSSLQAISLEGNPAQKNVGDEQLRKYLLGLLPNLVYYNRQGTKDARLGTSTHQLDRGLRSELKNSSRKSSHGASSSHKPGSSTARKAPALQKRSKERRSRLPPVGHKLSPAAYENYHVATGDRLSSLRTELSMRRSRSEGTLGPI

SEQ ID NO: 4748 - protein, 229 aa, Arabidopsis thaliana
MASSSLSPATQLGSSRSALMAMSSGLFVKPTKMNHQMVRKEKIGLRISCQASSIPADRVPDMEKRKTLNLLLLGALSLPTGYMLVPYATFFVPPGTGGGGGGTPAKDALGNDVVAAEWLKTHGPGDRTLTQGLKGDPTYLVVENDKTLATYGINAVCTHLGCVVPWNKAENKFLCPCHGSQYNAQGRVVRGPAPLSLALAHADIDEAGKVLFVPWVETDFRTGDAPWWS

SEQ ID NO: 4749 - protein, 361 aa, Arabidopsis thaliana
MAALCCCPTTIIVSGKVSSRIKTAGPLPRINPFKNQKRLITERRNLIVKSIIEDREAIDVKNDNFKAEEELSEDKVEDTDRLMSRGINAAIVLAAGTVAVTKLLTIDHDYWQGWTLYEILRYAPEHNWFAYEQILKTNPVLAKMAISGIVYSLGDWIAQCYEGKPLFEFDRTRVLRSGLVGFTLHGSLSHYYYQFCEALFPFQEWWVVPAKVAFDQTVWSAIWNSIYFTVLGLLRFQSPADIFSEIKTTFLPMLTAGWKLWPLAHLVTYGVIPVDQRLLWVDCIELIWVTILSTYSNEKAEAQASEETNSSSHSSEVCQVFLFSKNLSSKISLERLNVCSECSSKLICACKYLTGLGDISM

SEQ ID NO: 4750 - protein, 652 aa, Arabidopsis thaliana
MKNESRTSEEISKLGIFSGVGFSMGRPDVHLDRRVAENHQAIPRNNVRSTPSLDLSTLFDETSETKPMDPKTMAAVRAGKENYLRSNNSYISVAPTLVNDRGNTILHLAASSGHVSLVRYIIQKCPGLLLKSNMMGEVALHLAAEAGHLDVVWNLIDFINDISCTNLPVAKRIYFAKNKNQDTALHVALKGKHEVVASYLVSAAKSLSFVANRDGFSPLYLAIEAGHTSLVTTMCHGTNELSSKVGGRSIVHAALKANRKDILDALLSKDASLINLRDEGRTSLSFGASIGYYQGFSYLFDKNRDKVYVSDDDGLFPTHMAAKYGHVQILEEILKHCPEAIELLDRDGQNILHLAAKYGKLKVIKFILSCCKDKNKKKLINEQDVNGNTPLHLATINWHPKVVSMFTWDHRVDLKKRNYIGFTALDVAEENIDSSYIVHQRLTWMALINAGAPKSSTPITENLRSFKKPDGGKYKDRVNTLMLVATLVATMTFTAGFTLPGGYNDSFPHLGMAVLAKRTAFQVFLVCDTLAMYSSIITIVALIWAQLGDLSIILKAFNIALPFLGLALTSMSIAFMAGTYVAVSHLPLLGYFVLGIGIIFLLVLLLLLVPYVSPYAHAQPLLRHIFYYPYFLKLLAAGDNKNIVDVYTASDE

SEQ ID NO: 4751 - protein, 249 aa, Arabidopsis thaliana
MALDQSFEDAALLGELYGEGAFCFKSKKPEPITVSVPSDDTDDSNFDCNICLDSVQEPVVTLCGHLFCWPCIHKWLDVQSFSTSDEYQRHRQCPVCKSKVSHSTLVPLYGRGRCTTQEEGKNSVPKRPVGPVYRLEMPNSPYASTDLRLSQRVHFNSPQEGYYPVSGVMSSNSLSYSAVLDPVMVMVGEMVATRLFGTRVMDRFAYPDTYNLAGTSGPRMRRRIMQADKSLGRIFFFFMCCVVLCLLLF

SEQ ID NO: 4752 - protein, 772 aa, Arabidopsis thaliana
MATLKDIGVSAGINILTAFIFFIIFAFLRLQPFNDRVYFSKWYLRGLRSSPASGGGFAGRFVNLELRSYLKFLHWMPEALKMPERELIDHAGLDSVVYLRIYWLGLKIFAPIAMLAWAVLVPVNWTNNELELAKHFKNVTSSDIDKLTISNIPEGSNRFWAHIIMAYAFTIWTCYMLMKEYETVANMRLQFLASEGRRPDQFTVLVRNVPPDPDETVSELVEHFFLVNHPDNYLTHQVVCNANKLADLVSKKTKLQNWLDYYQLKYTRNNSQIRPITKLGCLGLCGQKVDAIEHYIAEVDKTSKEIAEERENVVNDQKSVMPASFVSFKTRWAAAVCAQTTQTRNPTEWLTEWAAEPRDIYWPNLAIPYVSLTVRRLVMNVAFFFLTFFFIIPIAFVQSLATIEGIEKVAPFLKVIIEKDFIKSLIQGLLAGIALKLFLIFLPAILMTMSKFEGFTSVSFLERRSASRYYIFNLVNVFLGSVIAGAAFEQLNSFLNQSPNQIPKTIGMAIPMKATFFITYIMVDGWAGVAGEILMLKPLIIYHLKNAFLVKTEKDREEAMNPGSIGFNTGEPQIQLYFLLGLVYAPVTPMLLPFILVFFALAYVVYRHQIINVYNQEYESAAAFWPDVHGRVITALIISQLLLMGLLGTKHAASAAPFLIALPVITIGFHRFCKGRFEPAFVRYPLQEAMMKDTLERAREPNLNLKGYLQDAYIHPVFKGGDNDDDGDMIGKLENEVIIVPTKRQSRRNTPAPSRISGESSPSLAVINGKEV

SEQ ID NO: 4753 - protein, 533 aa, Arabidopsis thaliana
MGCFSSKHRKTQNDGGGERSIPIIPVQTHIVDQVPDHRKPQIPSPSIPISVRDPETILGKPFEDIRKFYSLGRELGRGGLGITYMCKEIGTGNIYACKSILKRKLISELGREDVKTEIQIMQHLSGQPNVVEIKGSYEDRHSVHLVMELCAGGELFDRIIAQGHYSERAAAGTIKSIVDVVQICHLNGVIHRDLKPENFLFSSKEENAMLKVTDFGLSAFIEEGKIYKDVVGSPYYVAPEVLRQSYGKEIDIWSAGVILYILLCGVPPFWADNEEGVFVEILKCKIDFVREPWPSISDSAKDLVEKMLTEDPKRRITAAQVLEHPWIKGGEAPEKPIDSTVLSRMKQFRAMNKLKKLALKVSAVSLSEEEIKGLKTLFANMDTNRSGTITYEQLQTGLSRLRSRLSETEVQQLVEASDVDGNGTIDYYEFISATMHRYKLHHDEHVHKAFQHLDKDKNGHITRDELESAMKEYGMGDEASIKEVISEVDTDNALSPVEIMREVALEIGVPVNTFKQNNVQEDGLYLPVLNNAA

SEQ ID NO: 4754 - protein, 743 aa, Arabidopsis thaliana
MYHPNMFESHHMFDMTPKSTSDNDLGITGSREDDFETKSGTEVTTENPSGEELQDPSQRPNKKKRYHRHTQRQIQELESFFKECPHPDDKQRKELSRDLNLEPLQVKFWFQNKRTQMKAQSERHENQILKSDNDKLRAENNRYKEALSNATCPNCGGPAAIGEMSFDEQHLRIENARLREEIDRISAIAAKYVGKPLGSSFAPLAIHAPSRSLDLEVGNFGNQTGFVGEMYGTGDILRSVSIPSETDKPIIVELAVAAMEELVRMAQTGDPLWLSTDNSVEILNEEEYFRTFPRGIGPKPLGLRSEASRQSAVVIMNHINLVEILMDVNQWSCVFSGIVSRALTLEVLSTGVAGNYNGALQVMTAEFQVPSPLVPTRENYFVRYCKQHSDGSWAVVDVSLDSLRPSTPILRTRRRPSGCLIQELPNGYSKVTWIEHMEVDDRSVHNMYKPLVQSGLAFGAKRWVATLERQCERLASSMASNIPGDLSVITSPEGRKSMLKLAERMVMSFCSGVGASTAHAWTTMSTTGSDDVRVMTRKSMDDPGRPPGIVLSAATSFWIPVAPKRVFDFLRDENSRKEWDILSNGGMVQEMAHIANGHEPGNCVSLLRVNSGNSSQSNMLILQESCTDASGSYVIYAPVDIVAMNVVLSGGDPDYVALLPSGFAILPDGSVGGGDGNQHQEMVSTTSSGSCGGSLLTVAFQILVDSVPTAKLSLGSVATVNSLIKCTVERIKAAVSCDVGGGA

SEQ ID NO: 4755 - protein, 387 aa, Arabidopsis thaliana
MDHQNYQYQNPFERRPILKSKAPAVKWIKEWVPQDIVATGGKCHLHKWVTEDTFSRLKEKEKEPDVPEPEPEPTTEILFLCSYDGCGKTFFDVSALRKHSHIHGERQYVCDQEGCGKKFLDSSKLKRHYLIHTGERNYICTYEGCGKAFSLDFNLRSHMKTHSQENYHICPYSGCVKRYAHEYKLKNHVAAYHEKNGGGETPKYTPPAEKVLRTVKTPATVCGPSSDRPYACPYEGCEKAYIHEYKLKLHLKREHPGHLQEENADTPTLNKHNGNDRNEIDDGSDQDVYRKHASNGKGQTHKQQSRAKPNMRTPPAKVGKKGSTSSPAKARIAKKPWQAKETFEEVEREEEEDSEETEEDRDNVEDGWRFGENNEDDDDDEETEYED

SEQ ID NO: 4756 - protein, 230 aa, Arabidopsis thaliana
MGGEDDKDKKWNPPPPQQKPDSRPWEVLAAFVICATATTFAVHQLRRNFDWVYTQLTRTPSAGRGTFRTSFQEEAWRRYNKRMQEEYEDELERVARIRRMQSVFNRERNKFRRGYENWTENDPGAQQYHQQFQRHDWYWKTESSHRNQRTNHQEPSDQRRVYPLSHHYSVLGLSRSRATPYTEAEIKKAFREKALEFHPDQNQDNKIVAEAKFKEVLLSYEAIKQEIKEK

SEQ ID NO: 4757 - protein, 361 aa, Arabidopsis thaliana
MDEEEAMLLLKEEDEGTRRTSVPTQLMKLKRTHWWILVFISIFFLISAQAIAVLLGRFYYNEGGNSKWISTLVQTCGFPILYLPLCFLPASHSSSSSCSFKTLVWIYLSLGFAIGLDNLLYSFGLLYLSASTYSILCSSQLAFNGVFSYYINSQKITCLILFSVLFLSVSAVLVSLDDDSNSPSGDSKWSYLIGCLCTVFASLIYSLQLSLMQFSFENVLKSETFSMVLEMQIYTSLVASCVAVIGLFASGEWMLLSVEMEEFHEGQVIYVLTLVGTAVSWQLGSVGAVALIFLVSSLFSNLIGTLSLIVTPLAAIAVFHDKLTEVKMVAMLIAFMGFGFYIYQNYLDDLKVQRAREAQAE

SEQ ID NO: 4758 - protein, 317 aa, Arabidopsis thaliana
MEEDCEFRHWDELIPDALGLIFSHLPLQEVLTVVPRVCKAWNRAVTGPYCWQEIDIELWSNRFHQSDHLDRMLEMLIPRSAGSLRKLSVTGLRNDSIFSFIAQHAGSLKTLKVPRSGLTNSGVVNVAEKLSSLTFLDLSYCCKIGPEAIQAIGKHCKSLREFCRNMHPLDVASVVSHDDEAYAIANTMPKLKRLEIAYHRVSTEGVLKILSCCVFLEFLELRGCWDVQLDNKFFKEKFPDMKVLGPRVIGFYDMINDWEDCCSDYFSDGSDYLAWEFFEDGVMGEFYEDEFEHGWDDNFYAENAVLDMEPHIWPPSP

SEQ ID NO: 4759 - protein, 386 aa, Arabidopsis thaliana
MVYSSGSWRDAYKGMSSDNVKGLVLALSSSIFIGASFIVKKKGLKKAGASGLRAGSGGYSYLLEPLWWIGMITMIVGEIANFAAYAFAPAILVTPLGALSIIISASLAHIILQEKLHTFGILGCALCIVGSVTIVLHAPQEQDIVSVLEVWNLATEPAFLFYAAAVVGAAIVLIVQFIPLYGQSHVMVYIGVCSLIGSLSVMSVKALGIALKLTFSGTNQLGYPQTWVFTVIVLFCVITQMNYLNKALDTFNTAVVSPIYYVMFTSLTILASVIMFKDWDRQSGTQIMTELCGFVTILSGTFLLHTTTDMVDGESKGNLSSEEDSHLLLRIPKHSEDSNGFVQDGIILSLRRQESAKSPRPARQNKQLEDDLEAVPLRRQESSLRS

SEQ ID NO: 4760 - protein, 342 aa, Arabidopsis thaliana
MACFLNCVRFDVSKTITDKPTSQGSGVTCYNSWDDVETLTSNFSRLIGSGGYSSIYMARFSGSDKAALKVHVSSHRLYQVFRLELDILLRLQHPNIVKLLGYFDDSEENGALLLEYLPQGNLQEKLQSNSKQVLQWRNRVAIALQLVQAIEHIHEKCSPQIVHGDIKSSNVLLDKNFDCKLCDFGSAKVGFSSMVQPPTMSPRSRQVKMVGSPGYTDPHYLRTGIASKKMDMYGFGVVVLELVSGKEAFSAERGEMLVHIAAPLMNEILDSSVDISEDKVRQFLDPRLLRDSLDIDEVKTMLSVAAVCISSKLSLRPSAAQVADTLIKEIPSLSFLGCGKGV

SEQ ID NO: 4761 - protein, 350 aa, Arabidopsis thaliana
MMISERDDFSLTGPLHLTSIDWANEHHRRSVAGSLVQGIYVAERDRQLQREGPELALSPIWSEFFHFRLIRKFVDDADNSIFGGIYEYKLPQQLSQTVKSMEFSPRFVIAFRGTVTKVDSISRDIEHDIHVIRNGLHTTTRFEIAIQAVRNIVASVGGSSVWLAGHSLGASMALLTGKTIARTGFFPECFAFNPPFLSAPIEKIKDKRIKHGIRIAGSVITAGLALAKKATQHYSQNDRALPAPPDPFEALSDWFPRLYVNPGDHLCSEYVGYFEHRNKMEEIGIGFVERVATQHSLGGMLLGGQEPVHLIPSSVLTVNLSSSRDFKQAHGIHQWWREDNKFETKVYQYK

SEQ ID NO: 4762 - protein, 628 aa, Arabidopsis thaliana
MSSSTKGSVKKSSIKHSCNLAEVKRKLSKISDHHSHVEYAYAFQRDNRERVDTRLSQILSRDALISAVDLLWDRSGFVSLKEGNFDYVDRDEVSSEKAKSQLSSTPQSRVRLLGVAEKMYSFDPYNRKSLLNQTDGSKSICGSCKGIGFPFEARWKTLYSWMEGVLPSSTRYHEEGAEIEKRENFEGCILNPVSSKEELASRNGDGCDCVFDAIGAKDQSTVIEPRSLLLATVAESVVDTRVSRSNDVNYLFLLYKDRCVNNKGVNMISSKCSTDCDAEVSSSGNNLDEDCLSIVENKQLLEKDRNDKETEVCLSSPETTTYAFAKQRHAFAGALAGISVSLCLHPLDTVKTMIQSCRLEEKSLCNTGRSIISERGFSGLYRGIASNIASSAPISALYTFTYETVKGTLLPLFPKEYCSLAHCLAGGSASIATSFIFTPSERIKQQMQVSSHYRNCWTALVGIIQKGGLLSLYAGWTAVLCRNIPHSIIKFYVYENMKQMVLPSPGPCGEMAQPTTLQTLTCGGLAGSAAAFFTTPFDVVKTRLQTQIPGSRNQHPSVYQTLQSIRRQEGLRGLYRGLIPRLVMYMSQGAIFFASYEFYKSVLSLAAAQPNTSALSGTKQKMEIALNR

SEQ ID NO: 4763 - protein, 694 aa, Arabidopsis thaliana
MEFGKGIDMEQSPNSVLPPPRPFTESEKRTSTRLKPPRRDEILRVKEGFTEISFRRYRSTSCKNFPSKPLAMGDTTELRRGSVYQSSNELFKELREPQGRKDSKAKLELSRSSDASFSFRVVDSSRKGSTEKRPHKTVLDGQKSLVEPCTSSNFIDICLKSGIKDRAVVLDSDDNDHKIRLPKPYSAKVDSVETSYNKDSSRVRKMFDPFVKSKSLRSPLGYIGESGDQFKLGRNSERCRSMLSDYSNIHKRSNLCPPPVVNKDYTSVLKSSPVHLHCRLKMESKNGLPVFQFVSDSPEEVYAAKTWKSDNGSTWVYTFSSAGSRKRSSASVRGLTDVSKESLLVAQMQVTCKMCSEVRKKGQDPETLMVNEFVLYDIAQARRSVSTKEDQSLPLDTVNNASKNSVKSDSEIRNNSMSGDASDTMKQRSQPKRTSQSYDLEASNGTNPWSAANLHPDLEIAAIIIQDTIEKRESLKYRRGDKRLMEKTNILGLSPIEEEKKELFGSRSLEKLKVVIPRGNHGLPTTENSCPSPLIQRWRSGGGCDCGGWDMACPLMVLGNPRISCSHDQPLVENQHPLQLFVQGAKEHIPALYMSFVEEGQYDVHFHAQLSTLQAFSICVAILHNTEVSDSYRNGENVQQFSHCNSLKMLIDDDVQFLVEAVTEEEEVPKPLKEAVTALQSYMPNPPFSPISRV

SEQ ID NO: 4764 - protein, 373 aa, Arabidopsis thaliana
MAEAIGAVSLVGHRPSIVRITVKNELKTQKSQSIVRFPVKVDYSAKGVLSHLMTQSVKKNRMSVFPIRALAMELTKEKKKDDRLPKTWNYLDSGADDKPSLWPPENKADKPSLHNPLLRQERMGCGWLGAIFEWEGVLIEDNPDLDNQSWLTLAQEEGKSPPPAFMLRRVEGMKNEQAISEVLCWSRDPVQVRRMAKRKEEIFKALHGGVYRLRDGSQEFVNVLMNNKIPMALVSTRPRETLENAVGSIGIRKFFSVIVASEDVYRGKPDPEMFIYAAQLLDFIPERCIVFGNSNQTIEAAHDGRMKCVAVASKHPIYELGAAELVVRRLDELSIIDLKKLADTDLTEFEPELEMEKEDERELPSSAVAVDDF

SEQ ID NO: 4765 - protein, 1013 aa, Arabidopsis thaliana
MVSERHSARLYNSLPMESFRTILTHTYPYPHEHSRHAIIAVLFGCLFFISSDNMQTLIEKFSVKWWSMYACLLGFFYFFSSPFIQKTIRPNYSNFSRWYIAWILVAALYHLPNFQSMGLDLRMNLSLFLTIYISSILFLVVFHIIFLGLWYVGLVSRVAGRRPEILTILQNCAVLSMACCIFYSHCGNRAVLRQKPLGRQYTSWFSFWKREHRHNTWLAKFIRMNELKDQVCSSWFAPVGSASDYPLLSKWFIYGEIACNGSCPDSADEISPIYSLWATFIGLYIANYVVERSTGWALTHPLSVDKYEKLKNQQLKPDFLDMVPWYSGTSADLFKTVFDLLVSVTVFLGRFDMRMLQAAMTKSGDASGRKELLYDHLAEKQDFWFDFMADTGDGGNSSYSVAKLLAQPSLRVPVANNFISLPRGNVLLIGGDLAYPNPSSFTYEKRLFCPFEYALQPPRWYKNDSIAVDKPELPNGVSDLKSYEGPQCFLIPGNHDWFDGLNTFMRYICHKSWLGGWLMPQKKSYFALQLPKGWWVFGLDLALHGDIDVDQFKFFSELVKDKVGESDAVIIITHEPNWLLDWYWSGDTGQNVRHLICDVLKYRCKLRMAGDLHHYMRHSCNQSDGPAHVQHLLVNGCGGAFLHPTHVFSKFSKFYGASYGSKVAYPSFDDSSKIALGNILKFRKKNWQFDFIGGIIYFILVFSLFPQCKLAHVLRGDSFSGHLESFLGTVWSAFAYVMEQSYVSFTGVLMLLITAITFVPSKVSLKKRVVIGVLHVAAHLMAALILMLMLELGIEICIQHNLLANSGYHTLYEWYKSVENEHFPDPTGLRARIEQWTFGLYPACIKYLMSAFDVPEVMAVTRTNICKHGMESLSRSGAVIYYASVFLYFWVFSTPVVSMVFGSYLYICINWFHIHFDEAFSSLRIANYKSFTRFHILEDGDIEVFTLAVDKVPKDWKLDKDWDSEPKQSFKMSYEREFPSKWGASTSQQDPVNTVKIVDRFVIHRSQKENGEC

SEQ ID NO: 4766 - protein, 856 aa, Arabidopsis thaliana
MSMGGGSNHEFGQWLDQQLVPLATSSGSLMVELLHGNLDIWVKEAKHLPNMICYRNKLVGGISFSELGRRIRKVDGEKSSKFTSDPYVTVSISGAVIGRTFVISNSENPVWMQHFDVPVAHSAAEVHFVVKDNDPIGSKIIGVVGIPTKQLCSGNRIEGLFPILNSSGKPCRKGAMLSLSIQYTPMERMRLYQKGVGSGVECVGVPGTYFPLRKGGRVTLYQDAHVDDGTLPSVHLDGGIQYRHGKCWEDMADAIRRARRLIYITGWSVFHPVRLVRRNNDPTEGTLGELLKVKSQEGVRVLVLVWDDPTSMSFPGFSTKGLMNTSDEETRRFFKHSSVQVLLCPRYGGKGHSFIKKSEVETIYTHHQKTMIVDAEAAQNRRKIVAFVGGLDLCNGRFDTPKHSLFGTLKTLHKDDFHNPNFVTTEDVGPREPWHDLHSKIDGPAAYDVLANFEERWMASKPRGIGKGRTSFDDSLLRINRIPDIMGLSEASSANDNDPESWHVQVFRSIDSTSVKGFPKDPEEATGRNLLCGKNILIDMSIHAAYVKAIRSAQHFIYIENQYFLGSSFNWDSNKDLGANNLIPMEIALKIANKIRARENFAAYIVIPMWPEGAPTSKPIQRILYWQHKTMQMMYQTIYKALLEVGLDGQLEPQDFLNFFCLGNREVGTREVPDGTVNVYNCPRKPPQPNAAQVQALKSRRFMIYVHSKGMVVDDEFVLIGSANINQRSLEGTRDTEIAMGGYQPHHSWAKKGSRPRGQIFGYRMSLWAEHLGFLEQEFEEPENMECVRRVRQLSELNWGQYAAEEVTEMSGHLLKYPVQVDKTGKVSSLPGCETFPDLGGKIIGSFLTLQENLTI

SEQ ID NO: 4767 - protein, 313 aa, Arabidopsis thaliana
MAFTLTIPRFSAISRKPITCSSSRTQCPAPFTHGRSISLRRRLTLLPLKASTDQSGQVGGEEVDSKILPYCSINKNEKRTIGEMEQEFLQAMQSFYYEGKAIMSNEEFDNLKEELMWEGSSVVMLSSDEQRFLEASMAYVSGNPILSDEEYDKLKMKLKMDGSEIVCEGPRCSLRSKKVYSDLAIDYFKMFLLNVPATVVALGLFFFLDDITGFEITYLLELPEPFSFIFTWFAAVPAIVYLALSLTKLILKDFLILKGPCPNCGTENVSFFGTILSIPNDSNTNNVKCSGCGTEMVYDSGSRLITLPEGGKA

SEQ ID NO: 4768 - protein, 175 aa, Arabidopsis thaliana
MGSEENNSTSFPPTEPKLCDNGCGFFGSPSNMNLCSKCYRSLRAEEDQTAVAKAAVKNSLKLPSCSIIAPGQKHPLEIKPAHLETVVVTAEPSSVPVAAEQDEAEPSRPVRPNNRCFSCNKKVGVMGFKCKCGSTFCGSHRYPEKHECSFDFKEVGRDAIAKANPLVKADKVQRI

SEQ ID NO: 4769 - protein, 662 aa, Arabidopsis thaliana
MSFSDSGSSSYGGEYKNFRQITRERLLCEMLRPERNGSSKLTWKVLVMDKFTVKIMSSACKMSEITQEGISLVEVITKHRQPMTAMEVIYFIQPTEENVTAFLSDMTGKSPLYKKAFVFFSSPVSRSLVNLIKKDMRAMKRIGGLKEMNLEYISMDIQGFVTNNENALEELFCDDENHQRADACLNVVAKRIATVLASLKEYPFVRYRGAKALDATTMTTYRELIPTKLAASVWNCLARYKQTIEDFPQTETCELLILDRSIDQIAPLIHEWTYDAMCHDLLNMEGNKYTHEVPSKTGDKPEKKEVLLDEEDSIWVELRDAHIADASERLHEKMTNFVSKNKAAQLKHSSKDFGDLSSKDLQKMVHALPQYSEQIDKLSLHVEIARTINRTIMEQGLRDLGQLEQDLVFGDAGRKDVIKFLSTNHIISHESKLRLIMIVAAIYPKKFEGEKGRKMMELAKLSGDDVVAVNNMRLLGPVHTECKKSTTGSFPLKFDVLKTKRAARRDRVGETQTWQLSRFYPIVEELVEKLSKGHLPKQDYPCMNEPKPTFYSGSLSPSASPVLPHSRRTPTWARRHLSDDGYFSDSVLGRASSGFKRKGQRIFVFIVGGATRSELRVCHKLTEKLDREVILGSSSFLDPLTFLTKMKQLNEEEEISLDDIVI

SEQ ID NO: 4770 - protein, 587 aa, Arabidopsis thaliana
MDLFKILLLVFFVNISFCFAADPYSFYNFEVSYITASPLGVPQQVIAINGKFPGPTINVTTNENLVVNVRNKLDEGLLLHWNGIQQRRVSWQDGVLGTNCPIPPKWNWTYEFQVKDQIGSFFYFPSLHFQRASGGFGSFVVNPRAIIPVPFSTPDGDITVTIGDWYIRNHTALRKALDDGKDLGMPDGVLINGKGPYRYNDTLVADGIDFETITVHPGKTYRLRVSNVGISTSLNFRIQGHNLVLAESEGSYTVQQNYTSLDIHVGQSYSFLVTMDQNASSDYYIVASARVVNETIWRRVTGVGILKYTNSKGKAKGQLPPGPQDEFDKTFSMNQARSIRWNVSASGARPNPQGSFKYGSINVTDVYVLRNMPPVTISGKRRTTLNGISFKNPSTPIRLADKLKVKDVYKLDFPKRPLTGPAKVATSIINGTYRGFMEVVLQNNDTKMQSYHMSGYAFFVVGMDYGEWTENSRGTYNKWDGIARSTIQVYPGAWSAILISLDNPGAWNLRTENLDSWYLGQETYVRVVNPDENNKTEFGHPDNVLYCGALSKLQKPQKVSSSASKSIGFTSLSMVVMALVMMMMLQH

SEQ ID NO: 4771 - protein, 1117 aa, Arabidopsis thaliana
MKRKSPLQVQALEGFYLEQMYPTPKEMEDLGKSLGLTLKEVRGWFKRRRSRGKGVKSMANDGLGAKNPQLYDRSLMRSSTSSRCVGVAVEERCIVGTRKASCQNLLPSSHILAKVFRKDGPSLGSEFDHLPSGARKASWLGTSSVGQQKQKVARKRKISELMDHTSQDCIQENATVMKHGIGKGLMTVWRVMNPNRRDVSPCVDLLDERATLPQSSARNPPHQKKKQRQLASILKQKLLQKRSTEKKRRSIHREAELNKDETQREFKENCELAADGEVFKETCQTISTLVDDEELEMRERHERGNPLTCSCHHPSSGSHGCFLCKDLLPKFPPNSVQMRMPFGLHPWNSSPESVKKLFKVVHFLYTYSVTLDIGPFTLDEFTRAFHDKDSLLLGKIHLSLLKLLLLDVETELERGSFSNLSISCKFLALLQSVESQILILDMWRNSLNSLTWTELLRQILVAAGYGSLKCAVQSEELSKERKLMKKYGLRLGTLKGELFRMLNGQGNNGLKISELADAPEVAVLNLATVPEERENSICSTLASDITLFEKISESTYRVRVNCFSEDPDKSQSDSDDSGSVDDESDDCSISSGDEIEHVSENPALRKVKCRKRRKHKSKMREVCSEIDESHPGEPWLLGLMEGEYSDLSVEEKLDVFVALIDLLSSGSTIRMEDLPRAVADCAPSIYSHGSGGKIKRSSSNQYSYPRGSWVHGGELYGIKALSKSSDSHPVDSSSIVGAFAKLAGNRANNVHPMQSVYLGSDRRFNRYWLFLGTCNANDPGHRCVFFESSEDGHWEVINNKEALRALLSVLDDRGRREARLIESLEKRESFLCQAMLSRQVTQSETAHFTDIVREDSSSPVSDIDNNLCLNEIANDQFSSQHAAIVFEIGSKREKSLLWSLIQEFDDWIWANFNFNLNSVKHRRRSYLDSLTRCKSCHDLYWRDEKHCKICHATFEVDIDLEERYAIHAATCMRKEECDTFPDHKVLSSQLQSLKAAVYAIESAMPEDALIGAWRKSAHRLWAKRLRRSSSVSEITQVIGDFVGAINEEWLWHCSDQGQTLMGEIINCFPSMPQTTSAIALWLVKLDTLIAPYVEKAPPERDQPLCRTRNTSRRASKR

SEQ ID NO: 4772 - protein, 96 aa, Arabidopsis thaliana
MVYNNCGQECMFFSVAVLEKEAMRGGTPLHLKVFVKSRNFYIWLCCFILERKRHNSSLVLSMCFVFKLIRFGCVVFFLNTGLGEDLKLCTFLHMIP

SEQ ID NO: 4773 - protein, 444 aa, Arabidopsis thaliana
MMVFVVFVMCRYKILEELGDGTCGSVYKAVNLETYEVVAVKKMKRKFYYWEECVNLREVKALRKLNHPHIIKLKEIVREHNELFFIFECMDHNLYHIMKERERPFSEGEIRSFMSQMLQGLAHMHKNGYFHRDLKPENLLVTNNILKIADFGLAREVASMPPYTEYVSTRWYRAPEVLLQSSLYTPAVDMWAVGAILAELYALTPLFPGESEIDQLYKICCVLGKPDWTTFPEAKSISRIMSISHTEFPQTRIADLLPNAAPEAIDLINRLCSWDPLKRPTADEALNHPFFSMATQASYPIHDLELRLDNMAALPNLELNLWDFNREPEECFLGLTLAVKPSAPKLEMLRNVSQDMSENFLFCPGVNNDREPSVFWSLLSPDENGLHAPVESSPLSLSFSSPMQQHTVGPPQSSGFTMTSSMQPNMLDRPWMAVSAPFQQSHYL

SEQ ID NO: 4774 - protein, 265 aa, Arabidopsis thaliana
MTMPFALEICSAAIELRILVQIEGKLSAKVENGRSSVTLEDILMAETSSFRSLTTPTTPVRNHSSSSLLDVMRRERRRDKTAWKSLRDKLRLKRTATGWISSNPIPTLDNHILTPDNDSHRFNRLGFLLTNSETNRSSRDVSDAAEEAAEREGRLRLGTVLAAEREPPRMSLMELLEDNDGHMYELSARDEVEVEGRDGCDGGGEAVAVTGAAELGCCVCMVRSKGAAFIPCGHTFCRLCSRELWVQRGNCPLCNTAILQVLDIF

SEQ ID NO: 4775 - protein, 415 aa, Arabidopsis thaliana
MEFVTETLGKRIHDPYVEETRCLMIPGPIIVGSGPSGLATAACLKSRDIPSLILERSTCIASLWQHKTYDRLRLHLPKDFCELPLMPFPSSYPTYPTKQQFVQYLESYAEHFDLKPVFNQTVEEAKFDRRCGLWRVRTTGGKKDETMEYVSRWLVVATGENAEEVMPEIDGIPDFGGPILHTSSYKSGEIFSEKKILVVGCGNSGMEVCLDLCNFNALPSLVVRDSVHVLPQEMLGISTFGISTSLLKWFPVHVVDRFLLRMSRLVLGDTDRLGLVRPKLGPLERKIKCGKTPVLDVGTLAKIRSGHIKVYPELKRVMHYSAEFVDGRVDNFDAIILATGYKSNVPMWLKGVNMFSEKDGFPHKPFPNGWKGESGLYAVGFTKLGLLGAAIDAKKIAEDIEVQRHFLPLARPQHC

SEQ ID NO: 4776 - protein, 394 aa, Arabidopsis thaliana
METGTSIDNTGYEGIKNGSWFIQFRNGCNPWMARYVYGLIFLLANLLAWALRDYGRGALTEMRKFKNCKEGGDCLGTEGVLRVSFGCFLFYFIMFLSTVGTSKTHSSRDKWHSGWWFAKLFMLLGLTIFPFLLPSSIIQFYGEIAHFGAGVFLLIQLISIISFITWLNECFQAQKDAERCHVHVMLLATTAYTVCILGVILMYIWYVPEPSCLLNIFFITWTLFLIQLMTSISLHPKINAGFLTPALMGLYVVFICWCAIRSEPVGETCNRKAEGSSRTDWLTIISFVVALLAMVIATFSTGVDSQCFQFRKDENHEEDAIPYGYGFFHFVFATGAMYFAMLLVGWNIHHSMKKWTIDVGWTSTWVRIVNEWLAVGVYIWMLVAPMVLKSRQTT

SEQ ID NO: 4777 - protein, 822 aa, Arabidopsis thaliana
MTSLQLHFSVHFLRPKHRLRYSPIFNTRTFNFPGKITFRLRAKPNSLRCFAQSETKEENIGKREVNAAGCNTLYLSESFVREIYDGQLFIKLKRGFEFPALDPWGTSDPYVVMDLDGQVAKSKTKWGTKEPKWNEDFVFNIKLPPAKKIEIAAWDANLVTPHKRMGNSEINLESVCDGNLHKVLVELDGIGGGGKVQLEIKYKGFGEVEEEKKWWRFPFVSEFLQRNEIKSVLKNFVDSEAVESVLKNLVDSEAVPARQFVEYAFGQLKSLNDAPLKNTELLNNTAEDSEGASSEDSSDQHRSTNLSSSGKLSKDKDGDGDGHGNELEDDNESGSIQSESNFWDNIPDIVGQNIVQKLGLPSPEKLKWNGTELLENFGLQSRKTAEAGYIESGLATADTREADDEKEDGQVAINASKSSLADMKNATQELLKQADNVFGALMVLKAVVPHLSKDSVGSEKVIEKNGSSSVTDDVSGSSKTEKISGLVNVDGADEKNAEEMKTLFSSAESAMEAWAMLATALGHPSFIKSEFEKLCFLENDITDTQVAIWRDARRKRVVIAFRGTEQTKWKDLQTDLMLVPAGLNPERIGGDFKQEVQVHSGFLSAYDSVRIRIISLLKMTIGYIDDVTEREDKWHVYVTGHSLGGALATLLALELSSSQLAKRGAITVTMYNFGSPRVGNKQFAEIYNQKVKDSWRVVNHRDIIPTVPRLMGYCHVAHPVYLSAGDVEDIEFQKDGYHAEVIGEATPDILVSRFMKGEKELVEKILQTEIKIFNALRDGSALMQHMEDFYYITLLESVKLYYKTVEDPKGVESTTIQSVGES

SEQ ID NO: 4778 - protein, 551 aa, Arabidopsis thaliana
METAKAWLSKLKSKDKVKSSKKKEATSNVKEGPKTAGGEEALSNITKEKAAAAKLYIENHYKMQMQSLQERKERRKMLEKKLAAAEVSEEEQNNLLKDLEMKETEYMRRQRHKMGADDFEPLTMIGKGAFGEVRICREKGTGNVYAMKKLKKSEMLRRGQVEHVKAERNLLAEVDSNCIVKLYCSFQDEEYLYLIMEYLPGGDMMTLLMRKDTLTEDEARFYIGETVLAIESIHKHNYIHRDIKPDNLLLDKDGHMKLSDFGLCKPLDCSNLQEKDFTVARNVSGALQSDGRPVATRRTQQEQLLNWQRNRRMLAYSTVGTPDYIAPEVLLKKGYGMECDWWSLGAIMYEMLVGFPPFYSDDPMTTCRKIVNWRNYLKFPDEVRLSPEAKDLICRLLCNVEQRLGTKGADEIKGHPWFRGTEWGKLYQMKAAFIPQVNDELDTQNFEKFEETDKQVPKSAKSGPWRKMLSSKDINFVGYTYKNVEIVNDDQIPGIAELKKKSNKPKRPSIKSLFEDETSGGTTTHQGSFLNLLPTQIEDPEKEGSKSSSSG

SEQ ID NO: 4779 - protein, 200 aa, Arabidopsis thaliana
MFSEVEMARDVAICAKHLNGQSPHQPILCRLLQDLIHEKACREHGFYLGITALKSIGNNKNNNIDNENNHQAKILTFPVSFTCRTFLPARGDILQGTVKKVLWNGAFIRSGPLRYAYLSLLKMPHYHYVHSPLSEDEKPHFQKDDLSKIAVGVVVRFQVLAVRFKERPHKRRNDYYVLATLEGNGSFGPISLTGSDEPYM

SEQ ID NO: 4780 - protein, 341 aa, Arabidopsis thaliana
MMKIQPINNDLPANRVESSTKPVLKSRLKRLLDRPFTRISNSEKLLISGDGVVAGTEFEPSLAKMVQNYMEENNDKQTKNGRNTHRCNCFNGNNDISDDELDFFDYDNFKSLIQCGSFVEKSLLVEATKIIEKNKSVKRKDELRKIVVDELSSLGYDSSICKSKWDKTRSIPAGEYEYIDVIVNGERLIIDIDFRSEFEIARQTSGYKELLQSLPLIFVGKSDRIRQIVSIVSEASKQSLKKKGMHFPPWRKADYMRAKWLSSYTRNSGEKKPTVTSAAKVVAEPELDSSEIELIFEEKVLLPPLKSPITSVGRDDDDVAESVKKEAKVVTGLALLFKENH

SEQ ID NO: 4781 - protein, 201 aa, Arabidopsis thaliana
MFSSFTCCDGREEVIQAWYMDDSEEDQRLPHHKDPKEFLSLDKLAELGVLSWRLDADNYETDEDLKKIRESRGYSYMDFCEVCPEKLPNYEVKVKSFFEEHLHTDEEIRYCVAGSGYFDVRDRNEAWIRVWVKKGGMIVLPAGIYHRFTVDSDNYIKAMRLFVGEPVWTPYNRPHDHLPARKEYIDNFVKVNEGGVIDASA

SEQ ID NO: 4782 - protein, 684 aa, Arabidopsis thaliana
MSLLSADALGLLLKNAISASSMRLGRVVHARIVKTLDSPPPPFLANYLINMYSKLDHPESARLVLRLTPARNVVSWTSLISGLAQNGHFSTALVEFFEMRREGVVPNDFTFPCAFKAVASLRLPVTGKQIHALAVKCGRILDVFVGCSAFDMYCKTRLRDDARKLFDEIPERNLETWNAFISNSVTDGRPREAIEAFIEFRRIDGHPNSITFCAFLNACSDWLHLNLGMQLHGLVLRSGFDTDVSVCNGLIDFYGKCKQIRSSEIIFTEMGTKNAVSWCSLVAAYVQNHEDEKASVLYLRSRKDIVETSDFMISSVLSACAGMAGLELGRSIHAHAVKACVERTIFVGSALVDMYGKCGCIEDSEQAFDEMPEKNLVTRNSLIGGYAHQGQVDMALALFEEMAPRGCGPTPNYMTFVSLLSACSRAGAVENGMKIFDSMRSTYGIEPGAEHYSCIVDMLGRAGMVERAYEFIKKMPIQPTISVWGALQNACRMHGKPQLGLLAAENLFKLDPKDSGNHVLLSNTFAAAGRWAEANTVREELKGVGIKKGAGYSWITVKNQVHAFQAKDRSHILNKEIQTTLAKLRNEMEAAGYKPDLKLSLYDLEEEEKAAEVSHHSEKLALAFGLLSLPLSVPIRITKNLRICGDCHSFFKFVSGSVKREIIVRDNNRFHRFKDGICSCKDYW

SEQ ID NO: 4783 - protein, 322 aa, Arabidopsis thaliana
MASRIAKDVTELIGNTPLVYLNNVAEGCVGRVAAKLEMMEPCSSVKDRIGFSMISDAEKKGLIKPGESVLIEPTSGNTGVGLAFTAAAKGYKLIITMPASMSTERRIILLAFGVELVLTDPAKGMKGAIAKAEEILAKTPNGYMLQQFENPANPKIHYETTGPEIWKGTGGKIDGFVSGIGTGGTITGAGKYLKEQNANVKLYGVEPVESAILSGGKPGPHKIQGIGAGFIPSVLNVDLIDEVVQVSSDESIDMARQLALKEGLLVGISSGAAAAAAIKLAQRPENAGKLFVAIFPSFGERYLSTVLFDATRKEAEAMTFEA

SEQ ID NO: 4784 - protein, 378 aa, Arabidopsis thaliana
MDKLLENHQFATHAIAASASVSLGTALAYPLDTIKTIIQVGSGPNKKLSSFQVFNRVLRFSGYSGLYSGLGSLTLGRISGFGARFGVYEILTAFYKDGRHDNYVSVGEAFLAGLVGGAAETVMTSPFELIKVRKQVTAASRAPNASAVAETAPVSPMITKLLRRYTLDVKSLTQTVSLLSVLNHKHPNMTAALQEYPWMMTGTGNPPSAMDVKRPLDVASLEGYRALWRNLRSGLIRDCIYGGVFFSTWQFLHEAMVGWKAVGMNPLPSSEEEVGPLSPVAISLAAGISGAVAAAASHSFDTARTRAQCVILPKYTAKERKFLKWNKPGKRLERWTGIHPTDRNLLFRGIGMRMARSSVASTVIVGSYYLAVDLLVPK

SEQ ID NO: 4785 - protein, 718 aa, Arabidopsis thaliana
MVRKHGWQLPAHKFQVVAITVFCLLSVAYYAFFAPFVGGRIWEYILLGVYSPVALIVFVLYVRCTAINPADPGIMSKFERGASRGGDLPTAKDISRKFDETGSHLQSSPSVASRTSTLPNSSVKGSVGDAQRVEAAKRKSCFNPLAICCGVFVYEDCRSKEETDEQQGDREEALFCTLCNAEVRKFSKHCRSCDKCVDCFDHHCRWLNNCVGRKNYMTFISLMAVSLLWLLIEAGVGIAVIVRVFVNKKDMETEIVNRLGNGFSRAPFATVVGLCTAVSMLALFPLGELFFFHMLLIKKGITTYEYVVAMRAMSEAPAGASIDEEIPNVLYSPSGSATTGFSGGSSLGLPYKGAWCTPPRVFVDYQDEVIPHLDPRMVPSTVDPDAAETAERGNKIPKRPVKISAWKLAKLNSNEATRAAARARASSSVLRPIENRHLHDDELSSRSGTISVVSSVSTEANGATLSREIRNNDPMLSHCRNSYAPSQGSRDEYDTGTHSMSSLSSPSHVHETVTLSPLPQHHTAGHRFTAAAASNSSRPPLNQATNHMIHSTFDEKIMQKGNHADPLLLPAPAASLLRDVRRTSVVWDQEAGRYISVPATTSEPRTRFSSQNQPIPSSHMGNTQNPRPVGHPPQDSSSGRAPPPTQQQQGERLMYTGESIFFGGPLVNIPNRDGLRHDGDSGREGQDRMTLTLPREARFKRDTTSNQLPVFAPVGTRK

SEQ ID NO: 4786 - protein, 963 aa, Arabidopsis thaliana
MLYIRKKMTSMIVKTTPELFKGNGVFRTDHLGENRMVSRSNRLGDGSNRFPRTGTIHCQRLSIAKTGLHRETKARAILSPVSDPAASIAQKRVFTFGKGRSEGNKGMKSLLGGKGANLAEMASIGLSVPPGLTISTEACQQYQIAGKKLPEGLWEEILEGLSFIERDIGASLADPSKPLLLSVRSGAAISMPGMMDTVLNLGLNDQVVVGLAAKSGERFAYDSFRRFLDMFGDVVMGIPHAKFEEKLERMKERKGVKNDTDLSAADLKELVEQYKSVYLEAKGQEFPSDPKKQLELAIEAVFDSWDSPRANKYRSINQITGLKGTAVNIQCMVFGNMGDTSGTGVLFTRNPSTGEKKLYGEFLVNAQGEDVVAGIRTPEDLDTMKRFMPEAYAELVENCNILERHYKDMMDIEFTVQEERLWMLQCRAGKRTGKGAVKIAVDMVGEGLVEKSSAIKMVEPQHLDQLLHPQFHDPSGYREKVVAKGLPASPGAAVGQVVFTAEEAEAWHSQGKTVILVRTETSPDDVGGMHAAEGILTARGGMTSHAAVVARGWGKCCIAGCSEIRVDENHKVLLIGDLTINEGEWISMNGSTGEVILGKQALAPPALSPDLETFMSWADAIRRLKVMANADTPEDAIAARKNGAQGIGLCRTEHMFFGADRIKAVRKMIMAVTTEQRKASLDILLPYQRSDFEGIFRAMDGLPVTIRLLDPPLHEFLPEGDLDNIVHELAEETGVKEDEVLSRIEKLSEVNPMLGFRGCRLGISYPELTEMQARAIFEAAASMQDQGVTVIPEIMVPLVGTPQELGHQVDVIRKVAKKVFAEKGHTVSYKVGTMIEIPRAALIADEIAKEAEFFSFGTNDLTQMTFGYSRDDVGKFLPIYLAKGILQHDPFEVLDQQGVGQLIKMATEKGRAARPSLKVGICGEHGGDPSSVGFFAEAGLDYVSCSPFRVPIARLAAAQVVVA

SEQ ID NO: 4787 - protein, 654 aa, Arabidopsis thaliana
MAAGVMVTATGAVVILYLLSRRIVWARNGEDDSGGELGKSGRSGRRRIVRRPAQAPATWLETISTLSETLRFTYSETLGKWPIADLAFGINYLMRRQGNFPTASVYAGSNCIELKGPEIIMDLTELLRFLTLCMLFSKKPFAVFLESAGYTHEDVLLQKPKAGIMQPAFTIIRDTNSKCILLLIRGTHSIKDTLTAATGAVVPFHHSVLHDGGLSNLVLGYAHCGMVAAARWIAKLSVPCLLKALDENPSFKVQIVGHSLGGGTASLLTYILREQKEFASATCFTFAPAACMTWDLAESGKHFITTIINGSDLVPTFSASSVDDLRSEVTSSSWSNDLRDQVEHTRVLSVVYRSATAIGSRLPSIASAKAKVAGAGAILRPVSSGTQVMLKRAQDVAQAVVQTRSTLSSWSCIGPRRRAISSQLNSKVTDMPEASAIMAERRSTEALLAETVAIDRKGHKRTEHSSSSSSESDRDEPDEEEEEEPLISIDQVIAETSSIEEDVTEGELWDELDRELTRQENERDSEAMEEEAAAAKEITEEETVITGGGDSSTGQNQSPVSASSMDLIENQRFYPPGKIMHIVSVTETESETERDEVVVVGTTTVERVRIYETPRELYRKIRLSRTMINDHYMPMYKKMMELLITELECDSHSS

SEQ ID NO: 4788 - protein, 747 aa, Arabidopsis thaliana
MNGPPDRVDFKPMGPHHGGSFRPMGFAYDDGFRPMGPNGGVGGEGTRSIVGARYNYPAKYPPSESPDRRRFIGKAMESDYSVRPTTPPVQQPLSGQKRGYPISDHGSFTGTDVSDRSSTVKLFVGSVPRTATEEEIRPYFEQHGNVLEVALIKDKRTGQQQGCCFVKYATSKDADRAIRALHNQITLPGGTGPVQVRYADGERERIGTLEFKLFVGSLNKQATEKEVEEIFLQFGHVEDVYLMRDEYRQSRGCGFVKYSSKETAMAAIDGLNGTYTMRGCNQPLIVRFAEPKRPKPGESREMAPPVGLGSGPRFQASGPRPTSNFGDSSGDVSHTNPWRPATSRNVGPPSNTGIRGAGSDFSPKPGQATLPSNQGGPLGGYGVPPLNPLPVPGVSSSATLQQQNRAAGQHITPLKKPLHSPQGLPLPLRPQTNFPGAQAPLQNPYAYSSQLPTSQLPPQQNISRATAPQTPLNINLRPTTVSSATVQFPPRSQQQPLQKMQHPPSELAQLLSQQTQSLQATFQSSQQAISQLQQQVQSMQQPNQNLPLSQNGRAGKQQWAGSAIPRVASTTGSTPVSYVQTAAPAVSQSVGSVKCTWTEHTSPDGFKYYYNGLTGESKWEKPEEMIVFEREQQKQQQHQEKPTIQQSQTQLQPLQQQPQQVQQQYQGQQLQQPFYSSLYPTPGASHNTQYPSLPVGQNSQFPMSGIGQNAQDYARTHIPVGAASMNDISRTQQSRQSPQELMWKNKA

SEQ ID NO: 4789 - protein, 289 aa, Arabidopsis thaliana
MGNVNAKENRNSNNASAVEDEDAEICSREAMSAASDGNHVAPPELMGQSPPHSPRATQSPLMFAPQVPVLPLQRPDEIHIPNPSWMQSPSSLYEEASNEQGIPTMITWCHGGKEIAVEGSWDNWKTRSRLQRSGKDFTIMKVLPSGVYEYRFIVDGQWRHAPELPLARDDAGNTFNILDLQDYVPEDIQSISGFEPPQSPENSYSNLLLGAEDYSKEPPVVPPHLQMTLLNLPAANPDIPSPLPRPQHVILNHLYMQKGKSGPSVVALGSTHRFLAKYVTVVLYKSLQR

SEQ ID NO: 4790 - protein, 121 aa, Arabidopsis thaliana
MAKSSFKQEHDLEKRRAEAARIREKYPDRIPVIVEKAEKSDIPTIDKKKYLVPADLTVGQFVYVIRKRIKLSAEKAIFIFVDNVLPPAGALMSSVYEEKKDDDGFLYVTYSGENTFGFGSP

SEQ ID NO: 4791 - protein, 247 aa, Arabidopsis thaliana
MALLRRDLLGYTPLYAEKLDPSLSSIGDSKESFYFGSLEGVLAQRYPNQWPSEGILPSWRQTMETYYKNVLSVGRKLLGLIALALDLDEDFFEKVGALNDPTAVVRLLRYPGEVISSDVETYGASAHSDYGMVTLLLTDGVPGLQVCRDKSKQPHIWEDVPGIKGAFIVNIGDMMERWTNGLFRSTLHRVMPVGKERYSVVFFLDPNPDCNVKCLESCCSETCPPRFPPILAGDYIKERFRLTYATS

SEQ ID NO: 4792 - protein, 440 aa, Arabidopsis thaliana
MCRQNCRAKSSPEEVISTDENLLIYCKPVRLYNIFHLRSLGNPSFLPRCLNYKIGAKRKRKSRSTGMVVFNYKDCNNTLQRTEVREDCSCPFCSMLCGSFKGLQFHLNSSHDLFEFEFKLLEEYQTVNVSVKLNSFIFEEEGSDDDKFEPFSLCSKPRKRRQRGGRNNTRRLKVCFLPLDSPSLANGTENGIALLNDGNRGLGYPEATELAGQFEMTSNIPPAIAHSSLDAGAKVILTTEAVVPATKTRKLSAERSEARSHLLLQKRQFYHSHRVQPMALEQVMSDRDSEDEVDDDVADFEDRQMLDDFVDVNKDEKQFMHLWNSFVRKQRVIADGHISWACEVFSRFYEKELHCYSSLFWCWRLFLIKLWNHGLVDSATINNCNTILENCRNTSVTNNNNNSVDHPSDSNTNNNNIVDHPNDIKNKNNVDNKDNNSRDK

SEQ ID NO: 4793 - protein, 1147 aa, Arabidopsis thaliana
MDHGIVRSCIIADELITAIREARISIVIFSENYASSTWCLNELVEIHKCHKDKDLDQMVIPVFYGVDPSHVRKQIGGFGDVFKKTCEDKPEDQKQRWVKALTDISNLAGEDLRNGPSEAAMVVKIANDVSNKLFPLPKGFGDLVGIEDHIEAIKLKLCLESKEARIMVGIWGQSGIGKSTIGRALFSQLSSQFHHRAFITYKSTSGSDVSGMKLSWEKELLSEILGQKDIKIEHFGVVEQRLKHKKVLILLDDVDNLEFLRTLVGKAEWFGSGSRIIVITQDRQLLKAHEIDLIYEVKLPSQGLALKMICQYAFGKYSPPDDFKELAFEVAKLAGNLPLGLSVLGSSLKRRSKEEWMEMLAELQNGLNRDIMKTLRVSYVRLDPKDQDIFHYIAWLFNGWKVKSIKDFLGDGVNVNIRLKTLDDKSLIRLTPNDTIEMHNLLQKLATEIDREESNGNPGKRRFLENAEEILDVFTDNTGTEKLLGIDFSTSSDSQIDKPFISIDENSFQGMLNLQFLNIHDHYWWQPRETRLRLPNGLVYLPRKLKWLRWENCPLKRLPSNFKAEYLVELRMENSALEKLWNGTQPLGSLKKMNLRNSNNLKEIPDLSLATNLEELDLCNCEVLESFPSPLNSESLKFLNLLLCPRLRNFPEIIMQSFIFTDEIEIEVADCLWNKNLPGLDYLDCLRRCNPSKFRPEHLKNLTVRGNNMLEKLWEGVQSLGKLKRVDLSECENMIEIPDLSKATNLEILDLSNCKSLVMLPSTIGNLQKLYTLNMEECTGLKVLPMDINLSSLHTVHLKGCSSLRFIPQISKSIAVLNLDDTAIEEVPCFENFSRLMELSMRGCKSLRRFPQISTSIQELNLADTAIEQVPCFIEKFSRLKVLNMSGCKMLKNISPNIFRLTRLMKVDFTDCGGVITALSDPVTTMEDQNNEKINKVEKRPKCDKDEDDEDEYEYEYDEDEDDEDEYGEIYFKFQNCFKLDRAARELILGSCFKTTMVLPGLLSKLDVNDVEFKFNGTRVKRCGIRLLNVSTSPDDSEGSSETESPDDSDGDSVTEYHQQSGEKCDDVETESSKKRMRMTLGNSEKYFNLPCGQIVTDTVPLGWGESSSVSFNPWLEGEALCVDSMITEQQDAQIHIANVDWEWELW

SEQ ID NO: 4794 - protein, 796 aa, Arabidopsis thaliana
MKSSSSQSYDVFPNFRGEDVRHSLVSHLRKELDRKFINTFNDNRIERSRKITPELLLAIENSRISLVVFSKNYASSTWCLDELVKIQECYEKLDQMVIPIFYKVDPSHVRKQTGEFGMVFGETCKGRTENEKRKWMRALAEVAHLAGEDLRNWRSEAEMLENIAKDVSNKLFPPSNNFSDFVGIEAHIEALISMLRFDSKKARMIGICGPSETGKTTIGRALYSRLKSDFHHRAFVAYKRKIRSDYDQKLYWEEQFLSEILCQKDIKIEECGAVEQRLKHTKVLIVLDDVDDIELLKTLVGRIRWFGSESKIVVITQKRELLKAHNIAHVYEVGFPSEELAHQMFCRYAFGKNSPPHGFNELADEAAKIAGNRPKALKYVGSSFRRLDKEQWVKMLSEFRSNGNKLKISYDELDGKGQDYVACLTNGSNSQVKAEWIHLALGVSILLNIRSDGTTILKHLSYNRSMAQQAKIWWYENLERVCKKYNICGIDSSTDGGGSTYGQCSNSQFQRNMDASPGGNKTSNQSTKDSPRASQVEKEKIEYCEPHVYITPAIFSDGTRAPKYVESSSRRVTQVHHAKTWWPENCEKVYENHNNIYGIDRSIDGGDKFEGKSKVSDGGLDGKDQGSMYGQSSNSELQINMDADNRRCEPVSEMLFKNYNVCSPNGLTDVNCSNPQSQRKLDASLKKDKIVHEWIRTGSGFFFDFQGPKSIVSAAQVDEKNFEYCEQGVYITLGILSGGIIVLKHLEFSRRMAQQAKVWWSENWIKVYQEHNICGIDKSFDGRFDDRRVIRQLRPN

SEQ ID NO: 4795 - protein, 482 aa, Arabidopsis thaliana
MPQVKIIAKNFMDMVASLPAIKLDKLYNNVFICEAILRSLPPLAKKYVLQMLYIDVPVPATMMEEWVLADGTSKHRVAIDRLIQLRIFSEISDRKRGTSYSLNPTFQNNLQKHIISGGVLPREPMNSDNAIKLPSLQELETYALKQWECFLLQLINSGQGEKLTGISSSMMKIFQRGLLSQRDKDGPRLTESGFQFLLMDTNAQLWYIIREYILNAEERDVDPADLISFLLELSFHVTGQAYNLNTLTEVQNNTLKDLADLGLVKLQQGRKDSWFIPTKLATNLSVSLADSSARKEGFVVMETNFRMYAYSTSKLQCEILRLFARIEYQLPNLIACAITKESLYNAFDNGITSDQIITFLQQNSHPRCADRVPSIPENVTDQIRLWETDLQRIEMTQAHFYDEFPSKDVFEAACDFAREWRGLLWEDSKRMRLVVKSEVHNQMREFLHTQSSRKRKKSSHLMSCYSISYHRFYPANTCAPQT

SEQ ID NO: 4796 - protein, 4219 aa, Arabidopsis thaliana
MLEDQVAYLLQRYLGNYVRGLNKEALKISVWQGDVELKNMQLKPEALNALKLPVRVKAGFLGSVKLKVPWTRLGQEPVVVYLDRIFVLAEPATDVEGLSEDSIQEAKRNLIREMETKLVERARRLQTEMNKSWMGSVINTIVGNLKLSISNIHIRYEDLESNPGHPFSAGVTLEKLSAVTIDESGKETFITGGTLDSIQKSVELDRLAFYLDSDMSPWHIDKPWEVLTPFEWDQIFRYGTKDGKPADCLTRKHFYILQPVSGNAKYSKSQANESSNAVQPLQKAYVNLDDVTLCLSKGGYRDVMKLADNFAAFNQRLKYAHYRPSVPVKIDAKSWWKYAYRVVSEQIKIASGRMSWEHVLKYTSLRKRYITQYASLLKSDISRIVVDDDEEIEALDRELDTDVILQWRMLAHKFVERSVQAENYSKKQQAKSSWWPFGGKSEVSGGEGESIQFTDEDWERLNKVIGYKEGDEQSIINNAKPDALHTFLEVQMKRSASKLYDGEKECLAELSCEGLNCSVKLFPETKIADIKLGRYRLSSPSGLLAESAPASHSVLAVFCYKPFDAKVDWSLVAKASPCYMTYLKDSIDGIVNFFESSTAVSQTIALETAAAVQSTIDEVRRTAQEGMNRALKDHSRFLLDLDIAAPKITIPTEFRPDNHRSTKLLLDLGNLVIRSQDDYKHELTEEMDMYLQFDLVLSDVSALLVDGDYSWKQLSSKRASSSGRESSVTFLPVIDKCGVLLKLQQIRRPNPAYPSTRLAVRLPSLGFHFSPARYHRLMQVAQIFQTKDDESSQILRPWEEADFEGWLSILSWKGREASWQRRYLCLVGPFIYVLESPGSKSYKKYTSLRGKHIYKVPVELAGGVEHVLSIRNASRISEKVMEDVNALILMFDSEDSRKTWHSRLQGAVYRASGSAPIAGLSDTSSDSEESETEQKDGFDLSNLESVYVTGVLDELKICFSYGHQDDASFMAVLLARESKLFEFRALGGKVEVSMRGSDMFIGTVLKSLEIEDLVSHSGLNESCYLARSFIQSSEMLPSFEDAESRSPERLDPTSSEGEEKFYEAPEILVDSIDYTSLRTPSFSRIDGLLPVDNKNITKPSNETTESLDSFVKAQIVIYHQTSPQYKNIDNQVMVTLATLSFFCRRPTILAILEFVNAINVEDPSCESFEDNSPVAGEHTSPRRDGFEDSRDAAVKGLLGKGKSRIIFNLELNMARAQIFLMNENGTKFATLSQDNLLTDIKVFPNSFSIKASLGNLRISDDSLPDNHMYFWICDMRDPGGTSFVELVFTSFSIIDEDYEGFDYCLSGQFSEVRIVYLNRFIQEVAEYFMGLVPSDSKGVVKMKDQITDSEKWFTTSEIEGSPALKLDLSLKKPIIVMPRHTDSPDYLKLDIVHITVDNTFQWFAGDKNELNAVHVETMKIMVMDINLNVGSGAEIGESIIQDVKGVSVTINRSLRDLLHQIPSIEVSIEIDELRAALSNREYQILTECAQSNISELPHAVPPLSGDVVTSSRNLHETLTSEDTNAAQTEKTDTWISMKVSVVINLVELCLYAGTARDTPLAAVQFFLEESRGHVIVLMGPYIFSISLAPFSVLISGGWLLYKSNTHDEGFLTATLKGFSVIDNREGTEKEFRLAVGRPADLDFGDSHSVTDKNQGLTQSHVTTGSDIGPFPSMLTLDAQFGQLSTFVSVSIQRPQLLVALDFLLAVVEFFVPTIGSVLSSEEDKNLNMVDAIVMDKSIYKQQTAEAFLSPLGPLIAEDEKFDNFVYDGNGGTLYLKDRNGGILSSPSIEPIIYVGSGKRLQFRNVVFKNGQVLDSCISLGACSSYSVSREDGVELEVYHKAPQQDSERKEDPVSQSPSTTTERSTEMIIEFQAIGPELTFYNTSKDVVKTPLLSNKLLHAQLDAYGRVVIKNDEIKMSAHTLGLTMESNGVKILEPFDTFVKYSSVSGKTNIRLSVSNIFMNFSFSILRLFIAVEEDILSFLRMTSRKMTVVCSEFDKIGTIRNPCTDQIYAFWRPHPPPGFASLGDYLTPLDKPPTKGVLVVNTNLMRVKRPLSFKLIWSPLASGGLGGSSMDDKDERDSSCSIWFPEAPKGYVALSCVVSSGSTPPSLASTFCILASSVSPCSLRDCVAISSTDISQSSLAFWRVDNSVGSFLPADPSTLNLLGRPYELRHILFGSTAVLPKESSYVDDRTTPDDIIQPTRPQPLNSVNSGHRFEAVATFELIWWNRGSGSQKKVSIWRPIVSEGMAYFGDIAVSGYEPPNSCVVLHDTSDQEILKAAVDFQLVGRVKKHRGVESISFWMPQAPPGFVSLGCVACKGSPKPYDFTKLRCARSDMVAGDHFADESLWDTSDVWQRVEPFSIWSIGNELKTFIVRSGLKKPPRRFALKLADQGLPGGTDNMVIHAEIGTFSAALFDDYGGLMVPLVNVSLNNISFGLLGKTDYTNSTINFSLAARSYNDKYEAWEPLIEPADGFLRYQFNPRSFGAVSQLRLTSTKDLNVNISVSNANTIIQAYSSWNSLSNVHGYHKERGALPLVDNGKSVIEVHQKKNYFIIPQNKLGQDIYIRATEIKGFKDIVKMPSGDVRPVKVPVLTNMLDSHLRGELCRNPRIMVTVIVMDAQLPRTCGLSSHQYTGVIRLSPNQTSPVESELRQQSARTCGSVSNMLSSELEVVDWNEIFFFRIDSLDDFVLELIVTDVGKGAPVGSFSAPLKQIAQYMKDNVYQHNYANDLVWLDLSTTETMSINQGDQRKNCGKIRCAVLLPAKSKVDQSKSFREKKSGFLQVSPSIEGPWTTVRLNYAAPAACWRLGNDVVASEVSMQDGNRYVNVRSLVSVENNTDFLLDLCLQSKVNSIPDIPIGLLKPGDTLPVPLSGLTQSASYVLKLKCVFPDGSDEYSWSSVVSRPGGAEVSCESEPEICISALTESEHLLFCTQINSTSSGDNQKLWFCLKTQATEIAKDIRSDPIQDWTLVVKSPFSIANCLPFGAEYSVLEAQASGHFICRCRGVFISGETVKVYSVDIRNPLYFSLLPQRGWLPMHEAVLISHPNGVPAKTIGLRSSATGRIAQVILEQNYDEQQIVLSKIIRVYAPFWFSIARCPSLTLRLLDLSGKKQTRKVGLPFRSKKNDEVVLDEVTEEEIYEGHTIASTLNFKLLGLSVSISQFGNQQHGPVKDLSALGDMDGSLDVDAYDPDGNCMRLFLSTKPCAYQSVPTKVTSILSSTFSLLLHEPKVLHAYDSRVSFVFQPSGRDELQVRLRETEWSFPVQVTREDTIVLVLKSKNGARRYVKAEIRGFEEGSRFIVVFRLGPSNGPMRVENRSTVKSISVRQSGFGEDSWVLLEPLTTENFAWEDPYGQKFLDAKVESDHRSGVFKVDMEKGAVDSELCRELEVNFDVQEIGDIKIARFTDDDSTSQSSNEIISLTSIGNHGYSTPQTPTEHKTTTLEVIIEMGLVGISLVDHMPKELSYFYLERVFVSYSTGYDEGRTSRFKIILGRLQIDNQLPLTLMPVLLAPDNTGDSRQPVLKMTITMCNEETDGIQVYPYVYVRVTDNTWRLNIHEPIIWASADFYNKLQMDRLPKSSSVAQVDPEIHINLIDVSEVRLKVSLETAPAQRPHGILGVWSPILSAVGNAFKIQVHLRRVMHRDRFIRKSSILPAIGNRIWRDLIHNPLHLIFSVDVLGMTSSTLASLSKGFAELSTDGQFMQLRAKQVWSRRITGVGDAIVQGTEALAQGVAFGVSGVVTKPVESARENGILGFAHGVGRAFLGFIVQPVSGALDFFSLTVDGIGASCSRCLEVLSNRTALERIRNPRAVHADGILREYDEKEAIGQMLLHLAEASRHFGCTEIFREPSKFALSDCYEEHFLVPYKRIVMVTNKRVVLLQCSDLDKMDKKPSKIMWDVPWEELMALELAKAGSQRPSHLILHLKSFRKSESFAQVIKCSVPEDLNGLEPQAVRICSVVRKMWKAYQSNMKNLVLKVPSSQRHVYFAWNEADGRDSKTYKNKAIIKSRELSSSSSVSDDKKLVKHSINFSKIWSSERESKGRCSLCKKQDSEDGGVCTIWRPSCPAGFVSVGDVAHVGSHPPNVAAVYNNTNGVFALPVGYDLVWRNCLDDYISPVSIWHPRAPEGFVSPGCVAVAGFIEPELNTVYCMPTSLAEQTEFEEQKVWSAPDSYPWACQIYQVRSDALHFMALRQTKEDSDWKAIRVRDDYRSIESESGKNLRLE

SEQ ID NO: 4797 - protein, 827 aa, Arabidopsis thaliana
MAIYYKFKSARDYDTISMDGPFITVGLLKEKIYETKHLGSGKDLDIVISNAQTNEEYLDEAMLIPKNTSVLIRRVPGRPRIRIITREEPRVEDKVENVQADMNNVITADASPVEDEFDEFGNDLYSIPDAPAVHSNNLCHDSAPADDEETKLKALIDTPALDWHQQGADSFGPGRGYGRGMAGRMGGRGFGMERTTPPPGYVCHRCNVSGHFIQHCSTNGNPNFDVKRVKPPTGIPKSMLMATPNGSYSLPSGAVAVLKPNEDAFEKEMEGLTSTTRSVGEFPPELKCPLCKEVMRDAALASKCCLKSYCDKCIRDHIIAKSMCVCGATHVLADDLLPNKTLRDTINRILESGNSSAENAGSMCQVQDMESVRCPPPKALSPTTSAASGGEKKPAPSNNNETSTLKPSIEIAEITSAWASAEIVKVEKPVDASANIQGSSNGKEAAVSQLNTQPPKEEMPQQVASGEQAGKRKKKKPRMSGTDLAGPDYMMPMGPGPGNQYFNGFQPGFNGVQHGFNGVQPGFNGFHHGFNGFPGPFPGAMPPFVGYGFGGVIHPDPFAAQGFGFPNIPPPYRDLAEMGNRMNLQHPIMGREEFEAKKTEMKRKRENEIRRSEGGNVVRDSEKSRIMNNSAVTSSPVKPKSRQGPPPPISSDYDRRRRSDRSSPERQSSRRFTSPPRSSSRKSERDRHHDLDSEHDRRRDRPRETDRKHRKRSEKSSSDPTVEIDDNNKSNVFTRISFPEESSGKQRKTSKSSPAPPESSVAPVSSGRRHHSRREREMVEYDSSDDEDRHFKRKPSRYKRSPSVAPSDAGDEHFRHSKRSKGERARA

SEQ ID NO: 4798 - protein, 535 aa, Arabidopsis thaliana
MVITANDLSKWENFPKGLKVLLLLNGCDSDGDGSSAAETRSELESMDYIVTTFTDETEALSAVVKNPESFHIAIVEVNMSAESESFKFLEAAKDVLPTIMISTDHCITTTMKCIALGAVEFLQKPLSPEKLKNIWQHVVHKAFNDGGSNVSISLKPVKESVVSMLHLETDMTIEEKDPAPSTPQLKQDSRLLDGDCQENINFSMENVNSSTEKDNMEDHQDIGESKSVDTTNRKLDDDKVVVKEERGDSEKEEEGETGDLISEKTDSVDIHKKEDETKPINKSSGIKNVSGNKTSRKKVDWTPELHKKFVQAVEQLGVDQAIPSRILELMKVGTLTRHNVASHLQKFRQHRKNILPKDDHNHRWIQSRENHRPNQRNYNVFQQQHRPVMAYPVWGLPGVYPPGAIPPLWPPPLQSIGQPPPWHWKPPYPTVSGNAWGCPVGPPVTGSYITPSNTTAGGFQYPNGAETGFKIMPASQPDEEMLDQVVKEAISKPWLPLPLGLKPPSAESVLAELTRQGISAVPSSSCLINGSHRLR

SEQ ID NO: 4799 - protein, 401 aa, Arabidopsis thaliana
MDENNHGVSSSSLPPFLTKTYEMVDDSSSDSIVSWSQSNKSFIVWNPPEFSRDLLPRFFKHNNFSSFIRQLNTYGFRKADPEQWEFANDDFVRGQPHLMKNIHRRKPVHSHSLPNLQAQLNPLTDSERVRMNNQIERLTKEKEGLLEELHKQDEEREVFEMQVKELKERLQHMEKRQKTMVSFVSQVLEKPGLALNLSPCVPETNERKRRFPRIEFFPDEPMLEENKTCVVVREEGSTSPSSHTREHQVEQLESSIAIWENLVSDSCESMLQSRSMMTLDVDESSTFPESPPLSCIQLSVDSRLKSPPSPRIIDMNCEPDGSKEQNTVAAPPPPPVAGANDGFWQQFFSENPGSTEQREVQLERKDDKDKAGVRTEKCWWNSRNVNAITEQLGHLTSSERS

SEQ ID NO: 4800 - protein, 464 aa, Arabidopsis thaliana
MDRYKLIKEVGDGTFGSVWRAINKQTGEVVAIKKMKKKYYSWDECINLREVKSLRRMNHPNIVKLKEVIRENDILYFVFEYMECNLYQLMKDRQKLFAEADIKNWCFQVFQGLSYMHQRGYFHRDLKPENLLVSKDIIKIADFGLAREVNSSPPFTEYVSTRWYRAPEVLLQSYVYTSKVDMWAMGAIMAELLSLRPIFPGASEADEIYKICSVIGTPTEETWLEGLNLANTINYQFPQLPGVPLSSLMPSASEDAINLIERLCSWDPSSRPTAAEVLQHPFFQSCFYVPPSLRPKPSVARTPPPVGPRGSFEHQSVKRYPVSLANAKPFNSYVSPKSNAAFGSGVQRKLDMVNQDGTRNTKPVRSSVRDSKYRPPGKKSPHNAAAASLNKNRVTRSSVSETADKLANMTIGATGSRRHSVSVVGQHQQLKPPPMKAGWVGETRDMFLRPTQPTTNAYSRKVAG

SEQ ID NO: 4801 - protein, 453 aa, Arabidopsis thaliana
MLCASSSLALLGPPSSAMVTMASSPVSRFVGFGHHTILRYDNDQRLRRGCSWTGIEKKIPFPRKKTASASAYPLFRSQHTKDSSRPKNYKEVTKSARQMFAREISIQSKDSEISIAKVLFYIAAEDEAFLAVNRERDAQSLMKERESVQDQSDPSETDSEELLQLDGKSISEWVSEIDAISKEVEAELVSRDIGCHLVQVLEAVNTVLFDLRGFKRTSITLDPENSYLHSVLNCRCSTAFLISVIYIEVCKRLNVPIVGSPVGEDFLIWPKTEYPEELFKATSGQSLFSIVNGRCVDDPGSMASDLTAKSLQDLDMATNRDIIGIALANLIRLHWRRASKSSHGLMLTSPLSQLNNISSSNFPLLRPQDLRLAIAAAERLLILQPHNWALRRDLGMMLYYDRQYGEAVQELSICMAFAPPEEEAVLEPFVERLHLLRLISSLKPLGSDRLTVP

SEQ ID NO: 4802 - protein, 223 aa, Arabidopsis thaliana
MATKEFFLLDSLKVILQRTYLISVMLSLYKPQQLFLDCGEPAFFLTCKSITRLVAENLSNNKEFILKKRAWELMNPEYQKGKYRKVTTRKKKDPANKIAPSKKTSATKTESNAETENKKRPSLEINYNVLDKLFDPENSPKRAKLDKPVVVGDQIEYSKQNSEESLLKSQYSEEEEEEAEEPDWNEDYSNEDAYRGNEECYGNENLEFEDLDDDEEDDEGVIW

SEQ ID NO: 4803 - protein, 268 aa, Arabidopsis thaliana
MEIKSYQNQAEYFVEHYLLADPFLPYTSVLVGICLCKLVYDLTELFSSIHVKSYSALTKIKRIEWNNRGISTVHAIFISFMALYFAFFSDLFSDQRSLETLTVFRNSPLSTFGLGVSVGYFLADLGMIFWLYPSLGGSEYILHHCLSGTAVAYSLFSGEAQLYTYMVLISEVTTPEINLRWYLDIAGLKRSKAYLVNGVAIFFAWLTARILLFIYMFYHVYTHYDQVIEMHTFGYLLVFVVPISLSVMNLIWFGKIVKGLKKTLEKRQ

SEQ ID NO: 4804 - protein, 277 aa, Arabidopsis thaliana
MSSTVWWEGAEKTRVLIAPDSGCGGNKPGELLTLRHPKSENGTCFLFNNEMLQELQWFKQSYGSWFLGDYISEDGSLYMATPVDPVFILLPIFDEARMKKGENSGKFRQLDEILFVEGYPGYQHLLSLAEKCMEIVCQTQEVGSMKFYRLDNSKVLAWLSCKIYCLKNSLPELDKNYAAQDEKQTLVDSVSIVGEYLKTEPWLKLLYDHLGLKFVDPTMKETNMENLPTANENNMASSNSIQEKANKKPGKQTKQAKVETGSKNIRDMFSRACKKKC

SEQ ID NO: 4805 - protein, 741 aa, Arabidopsis thaliana
MATSRLARFVSEVAPPQFVTVMRRHRAAKQKLDTIKEEENKEDSFNGGMVVMMKTSHQHTLLIFRSCRDLAAIVGFRILLFTGFSGFYLVFLAFKFPHFIEMVAMLSGDTGLDGALSDTSLDVSLSGSLRNDMLNRKLEDEDHQSGPSTTQKVSPEEKINGSKQIQPLLFRYGRISGEVMRRRNRTIHMSPFERMADEAWILGSKAWEDVDKFEVDKINESASIFEGKVESCPSQISMNGDDLNKANRIMLLPCGLAAGSSITILGTPQYAHKESVPQRSRLTRSYGMVLVSQFMVELQGLKTGDGEYPPKILHLNPRIKGDWNHRPVIEHNTCYRMQWGVAQRCDGTPSKKDADVLVDGFRRCEKWTQNDIIDMVDSKESKTTSWFKRFIGREQKPEVTWSFPFAEGKVFVLTLRAGIDGFHINVGGRHVSSFPYRPGFTIEDATGLAVTGDVDIHSIHATSLSTSHPSFSPQKAIEFSSEWKAPPLPGTPFRLFMGVLSATNHFSERMAVRKTWMQHPSIKSSDVVARFFVALNPRKEVNAMLKKEAEYFGDIVILPFMDRYELVVLKTIAICEFGVQNVTAPYIMKCDDDTFIRVESILKQIDGVSPEKSLYMGNLNLRHRPLRTGKWTVTWEEWPEAVYPPYANGPGYIISSNIAKYIVSQNSRHKLRLFKMEDVSMGLWVEQFNASMQPVEYSHSWKFCQYGCTLNYYTAHYQSPSQMMCLWDNLLKGRPQCCNFR

SEQ ID NO: 4806 - protein, 793 aa, Arabidopsis thaliana
MASRNQNRPPRSPNAKKEGLGGISFDKRRKVETQGGTGRRQAFSAVNKQDVTMNSDVGSIEECGKVDFTKDEILALLSERAKAGKFDTKAKIEQMTDIIKRLKVCVKWFQQADETHVQEKENLKVSLESSEQKYNHKELEARTKEEELQATISKLEENVVSLHEKLAKEESSTQDAIECHRREKEARVAAEKVQASLGEELDKVKEEKMAAKQKVTSLEDMYKRLQEYNTSLQQYNSKLQTDLETVRAALTRAEKEKSSILENLSTLRGHSKSLQDQLSSSRVLQDDAIKQKDSLLSEVTNLRNELQQVRDDRDRQVVQSQKLSEEIRKYQENVGKSSQELDILTAKSGSLEETCSLQKERLNMLEQQLAIANERQKMADASVSLTRTEFEEQKHLLCELQDRLADMEHQLCEGELLRKKLHNTILELKGNIRVFCRVRPLLPDDGGRHEATVIAYPTSTEAQGRGVDLVQSGNKHPFTFDKVFNHEASQEEVFFEISQLVQSALDGYKVCIFAYGQTGSGKTYTMMGRPEAPDQKGLIPRSLEQIFQASQSLGAQGWKYKMQVSMLEIYNETIRDLLSTNRTTSMDLVRADSGTSGKQYTITHDVNGHTHVSDLTIFDVCSVGKISSLLQQAAQSRSVGKTQMNEQSSRSHFVFTMRISGVNESTEQQVQGVLNLIDLAGSERLSKSGATGDRLKETQAINKSLSALSDVIFALAKKEDHVPFRNSKLTYLLQPCLGGDSKTLMFVNISPDPTSAGESLCSLRFAARVNACEIGIPRRQTSTKLLDSRLSYG

SEQ ID NO: 4807 - protein, 139 aa, Arabidopsis thaliana
MIPQQWTPPCGSKCTNKYSAFTQLPWRVFCKKGCDADSDSWEDCVGDCSEICYKDPVLKDRPWTAVIDRSPGDAKYSEECFHACVAGCGYKFDVEAEIVNKVKPKRPPPPPPKPQPPPPPPRSQKPMQPPTEDVLATSA

SEQ ID NO: 4808 - protein, 762 aa, Arabidopsis thaliana
MYHPNMFESHHHMFDMTPKNSENDLGITGSHEEDFETKSGAEVTMENPLEEELQDPNQRPNKKKRYHRHTQRQIQELESFFKECPHPDDKQRKELSRELSLEPLQVKFWFQNKRTQMKAQHERHENQILKSENDKLRAENNRYKDALSNATCPNCGGPAAIGEMSFDEQHLRIENARLREEIDRISAIAAKYVGKPLMANSSSFPQLSSSHHIPSRSLDLEVGNFGNNNNSHTGFVGEMFGSSDILRSVSIPSEADKPMIVELAVAAMEELVRMAQTGDPLWVSSDNSVEILNEEEYFRTFPRGIGPKPIGLRSEASRESTVVIMNHINLIEILMDVNQWSSVFCGIVSRALTLEVLSTGVAGNYNGALQVMTAEFQVPSPLVPTRENYFVRYCKQHSDGIWAVVDVSLDSLRPSPITRSRRRPSGCLIQELQNGYSKVTWVEHIEVDDRSVHNMYKPLVNTGLAFGAKRWVATLDRQCERLASSMASNIPACDLSVITSPEGRKSMLKLAERMVMSFCTGVGASTAHAWTTLSTTGSDDVRVMTRKSMDDPGRPPGIVLSAATSFWIPVAPKRVFDFLRDENSRSEWDILSNGGLVQEMAHIANGRDPGNSVSLLRVNSGNSGQSNMLILQESCTDASGSYVIYAPVDIIAMNVVLSGGDPDYVALLPSGFAILPDGSARGGGGSANASAGAGVEGGGEGNNLEVVTTTGSCGGSLLTVAFQILVDSVPTAKLSLGSVATVNSLIKCTVERIKAALACDGA

SEQ ID NO: 4809 - protein, 143 aa, Arabidopsis thaliana
MPTSATAVAPSTGSVQKKDQDWRAILSPEQFRVLREKGTENRGKGEYTKLFDDGIYSCAGCATPLYKSTTKFDSGCGWPSFFDAIPGAIKQTPEAGGRRMEITCAACDGHLGHVVKGEGFPTATDERHCVNSVSLKFSEISSQ

SEQ ID NO: 4810 - protein, 234 aa, Arabidopsis thaliana
MAKTRPGVASKIKTGRKELDSYTIKGTNKVVRAGDCVLMRPSDAGKPPYVARVEKIEADARNNVKVHCRWYYRPEESLGGRRQFHGAKELFLSDHFDVQSAHTIEGKCIVHTFKNYTRLENVGAEDYYCRFEYKAATGAFTPDRVAVYCKCEMPYNPDDLMVQCEGCKDWYHPACVGMTIEEAKKLDHFVCAECSSDDDVKKSQNGFTSSPADDVKVRLSLFSHLLYRCSITYL

SEQ ID NO: 4811 - protein, 302 aa, Arabidopsis thaliana
MSSKDKKLSKPTSGRTGGIRTLSDLNRRSEPDSDSDSDGPQEYFTGGEKSGMLVQDPTKEPKHDDVDEIFNQARQLGAVEGPLEHPSSSRSFTGTGRLLSGESVPTALQQPEPVIHNIIFWSNGFTVDDGPLRKLDDPENASFLDSIRKSECPKELEPVDKRAPVHVNLMRRDEKCPEKEKLKVSFQGVGRTLGGASSSTASSQSNLTDVAAVQSPLQSLVVDETLPSTSIQLRLADGTRMVAKFNNHHTVNDIRGFIEFSRPGNPNNYTLQVMGFPPKPLTDPSQTIEQAGLASSVVIQKF

SEQ ID NO: 4812 - protein, 541 aa, Arabidopsis thaliana
MKGEREVKNGVSEEEREVKRKRVMERSDSPPPPLGFNNPLLPLANTYDDDDEEEENEQKKSQARGNGVAKGEGNGNKVKGEAQEEVDDDEDDDVSKGKGKHSRHVEVRRDCPYLDTVNRQVLDFDFERFCSVSLSNLNVYACLVCGKYFQGRSQKSHAYTHSLEAGHHVYINLLTEKVYCLPDSYEINDPSLDDIRHVLNPRFSRAQVNELDKNRQWSRALDGSDYLPGMVGLNNIQKTEFVNVTIQSLMRVTPLRNFFLIPENYQHCKSPLVHRFGELTRKIWHARNFKGQVSPHEFLQAVMKASKKRFRIGQQSDPVEFMSWLLNTLHMDLRTSKDASSIIHKCFQGELEVVKEFQGNENKEISRMSFLMLGLDLPPPPLFKDVMEKNIIPQVALFDLLKKFDGETVTEVVRPKLARMRYRVIKSPRYLMFHMVRFKKNNFFKEKNPTLVNFPVKDMELRDYIPSLPRAPEGENVCSKYNLIANIVHDGKPEDGYFRVFVQRKSQELWYEMQDLHVAETLPQMVELSEAYMQIYEQEEE

SEQ ID NO: 4813 - protein, 228 aa, Arabidopsis thaliana
MARTFILWLHGLGDSGPANEPIQTQFKSSELSNASWLFPSAPFNPVTCNNGAVMRSWFDVPELPFKVGSPIDESSVLEAVKNVHAIIDQEIAEGTNPENVFICGLSQGGALTLASVLLYPKTLGGGAVLSGWVPFTSSIISQFPEEAKKTPILWSHGTDDRMVLFEAGQAALPFLKEAGVTCEFKAYPGLGHSISNKELKYIESWIKRRLKGSSSTCLQLNCLKEMFH

SEQ ID NO: 4814 - protein, 324 aa, Arabidopsis thaliana
MDPVQSHGSQSSLPPPFHARDFQLHLQQQQQEFFLHHHQQQRNQTDGDQQGGSGGNRQIKMDREETSDNIDNIANNSGSEGKDIDIHGGSGEGGGGSGGDHQMTRRPRGRPAGSKNKPKPPIIITRDSANALRTHVMEIGDGCDLVESVATFARRRQRGVCVMSGTGNVTNVTIRQPGSHPSPGSVVSLHGRFEILSLSGSFLPPPAPPTATGLSVYLAGGQGQVVGGSVVGPLLCAGPVVVMAASFSNAAYERLPLEEDEMQTPVHGGGGGGSLESPPMMGQQLQHQQQAMSGHQGLPPNLLGSVQLQQQHDQSYWSTGRPPY

SEQ ID NO: 4815 - protein, 509 aa, Arabidopsis thaliana
MEMDEDMEIEPMVFEVKEIDLEYEFDAARWYDFTREELPEESQAAEFWFHSAPSYAPSPFVTKLLLREEVYDDKTEASTRSEDEEVVADVCDKYKGTFQQPNHLATDFNKTGSRMRSGIFSSQQQQGCNLKKVPNQPIWKGPTVSNHKHTDKPKFRAKSSIRPTPRSSTLMRPTASQLAKQNNASKFHMQVDQSHDKGSCGTSGTEVQASKRQKLDGGLLRKVADTKQEMSFVHKIPKKDTTLDKNAQHARTKITIPQEPDFATSQRAHRIRHKNDAKLEQEQPAVYRFKARPFNRKIFDAPSLPIRKKSTPKLPEFQEFHLKTSERAMQHSSAVTTRSHAYKESDKSIITDMLDGDNRESRRPSGMDISKHDVSEGSHVFKARPLNKKILSSRGDMGIFKNSKRETTVPLEFSFHSEKRVQPDLPTDLFSKLSIKSEIQPNDGSRTRLFQPKVSKENRINSFQARNEVTRMAAAKPVSSAGQQMQFGNSGITPETNQQWTARRNLGIR

SEQ ID NO: 4816 - protein, 2180 aa, Arabidopsis thaliana
MASSGDDLRLLSLIDVGDNVFSSFSDYLKPFSTLSTSRKKQDRATTIRALAKQFLPFLNKSISLLPKRLSVANSDKEARESALDLFRAYELCLDCLELVSAQLACKPHTVQSQRLRMIHCLDVWGLYENVYTEAFKVLEKLRGSDSKSRKSRLLPEVQDGDAEMALVVVDAVAAIFRAVAMSQQLDDKRYRKVLLLLEEVGGWLRVLDAKVYEKLHRAMVTSMGKCAVSLVREAERFNGDLVISFCDLTVKEHYKSALSKDRVYKFAREVLSVLFGFKDRKMSVTIDISMSVLRSLSCQFEDESNENLMEFFDLVDYCAHKFRAAGDMYCAKVSKKLNEMAAIFVEAIPQLNLVLRLYSTGLSITVCNSKLGEIKLEDSTDDWKIQAMFDDDARWQSLVSLLGMVDSYSGDEGNQTGSSSIGGHRNYNNKTHDSCKDRNKITCWPQYVDALKFLCQPLADFIYSVKRKIVLETEMSCASAHLITIHDAFLQFCDGCLFLQRCTSDKGDREIANNKAFLNAAMGAFIVSLRTQLKLEISAHLVEDVIGSPWIQSQELKYLIATLYNIGIVLYRNKELNKACEALKLCSKVSWRCVELHCHMFVNQSSSSDNDLSEDAIMDFVGEACNRCAFYLDILQKCSRRKIRQNIVHILENWLSAEHLIRRLPGPEAIVKQWVKIERECHTDLDAAGSCTTLYSLLSSSQKKSKRGIGKILEQELLAYDRVLPLRSNLGQQTRIKIADILLKDVYVTEDMHIERARILIWKARMTRTSGTEHITECICFLSEAISILGELHHGPNEEGSPSSHMLPIAYCLRAFCTQEADPNSKKVFQDISTSLNLWLRILSLDDSGDSLPTENIIPLLYNMIDLMSVKGCTELHHHIYQLIFRLFKWKNVKLEVCLAMLWECRRLSHALCPSPISDAFIQTLSENCADKSTCIDFWMDCLKDSKAKLIGFQQNFHDLHNKDEGPFQSDITIDDIKDAASELISSASLSGNSSFAAAYLYYDLCERLISFGKLSEALSYAKEAYRIRTLIFQDKFKYTAEKHIEKHNEDGKISEIRTFSIKNFQVYRLLATDFWPCGNFLWDINRCYLSPWSVLQCYLESTLQVGILNELIGNGLEAETILSWGKAFSCSQSLFPFVVAFSSALGNLYHKKQCLDLAEKELQNAKEILIANQRDFSCVKCKLKLEVTLDKQLGDISRKQIDRVSQTDGFLHAESLFSAALGKFCCSAWKSCIRSHGEEIAEEIVIDRNGGEGLGHNSSKTKLSIKEPPGNRGSRRGGRANKTCLSKDQDLISEPTSRLTRSMRHSLREQCQNRSNVPEVVSKKPNLCDRSVGSRGERVLLDTSNALPGFCICYKEKRQQCLSEEVTESGSLNNLVSLKWELCHRKLASSILVSLGKCLGDSGRIHLAHEALLHSISVLFKSTWSSHNQPSVSQLLEFIGKEVTRDVFAVDRAIILYNLCWLNLRNYHCRKSRSICCDLFHIPFTKLVSWLMLAFVLSGEVPILFQKVSRLLASLYLLSSSNSEFTFESDGNELSASHWVSFFHQASLGTHLSYHFISNLSQKHKSQCLSDKECTEATCSSCMVPEDLDLPRLAPDRTQDLVQFAKEFFINLPSSTIICISLLGGALNQLLQELMHIRSPVCAWVLISRLNPESQPVATLLPVDSIVEDMSDDSANLSSTEATQVKSLKGPWLCPWGTTVVDEVAPAFKSILEESHSSSSTTEEDTIESRGLWWKKRKKLNHRLGIFLRNLEASWLGPWRCLLLGEWSNYKLPDSAQKKLVNDLKSKCKMEVNEMLLKVILGGGTDNFKGEACVAQLSLRNGCYVGRGGYLYEEDSCKTPTAASNISESRHELALKLIHDAASKLGQQDGHENREPIILVLDPEVQMLPWENIPILRKQEVYRMPSVGCISAVLKKRSLQGEPAKSHVASFPLIDPLDSFYLLNPGGDLTDTQVTFESWFRDQNFEGKAGSEPSAIELTEALETHDLFLYFGHGSGAQYIPRREIEKLDNCSATFLMGCSSGSLWLKGCYIPQGVPLSYLLGGSPAIVATLWDVTDRDIDRFGKALLEAWLQERSDSSSEGGCSQCESLANDLAAMTLKGTKRSRKPSSRNKPAQSDVDGSGKIECNHKHRRKIGSFIAAARDACNLQYLIGAAPVCYGVPTGITRKKGIDALLPSSSR

SEQ ID NO: 4817 - protein, 700 aa, Arabidopsis thaliana
MVAFGKKLKERSIQEWQGYYINYKLMKKKVKQYSRQLEGGNLERRHVLKDFSRMLDNQIEKIALFMLEQQGLLASRLQTLRGSHDALQEQPDISHMSYLKEEYRAVGQDLLKLLFFVEMNAIGIRKILKKFDKRFGYRFTNYYVKTRANHPYSELQQVFRHVGLGAVVGAVSRNLHELQNNQGSYLSIYDQPVLPLQDPVVDSIRAAVDRLTRSTNFLHFMAQHALIMQEELPSPQDEEGEEEDGRYHFMSLLLNLVNTFLYMVNTYIIVPTADDYSMSLGAAATVCGVVIGAMAVAQLFSSVYFSAWSNRSYFKPLIFSSIVLFIGNLLYALAFDFNSIAVLLIGRLFCGLGSARAVNRRYISDCVPLKIRMQASAGFVSASALGMACGPALAGLLQIRFKIYKLTFNQDTLPGWVMAVAWLIYLVWLAISFREPAREPEEIPKTSEESNHSEAVQDVNLEKGMKQPLLLTSEEIEEQGEDECDGSEEASEDSRTPANSILAAYRLLTPSVKVQLLIYFMLKYAMEILLSESSVITTYYFGWSTSSVAIFLFCLGLTVLPVNLVVGSYISNMFEDRQILLVSEIMVCVGILLSFHVVVPYTVPQYVCSGLIMFVSAEVLEGVNLSLLSRVMSSRLSRGTYNGGLLSTEAGTIARVIADATITVAGFFGRNMLLNVTLLPSLVICVLSIVATCFTYNSLY

SEQ ID NO: 4818 - protein, 919 aa, Arabidopsis thaliana
MGSDKNSARFLHNLKMERVRTILTHTYPYPHEHSRHAMIAVVLGCMFFISSENMHSLVEKLDNNFKWWSMYACLLGFFYFFSSPFIKKTIRPSYSTFSRWYIAWILVAALYHLPSFQSMGLDLRMNLSLFLTIYISSIVFLLVFHIIFLGLWYIGLVSRVAGRRPEILTILQSCAVLSISCCIFYSHCGNRAFQRQTPLEKRHSSRFSLWKGEDGNSTWLAKFTHIDELRDQVCSSWFAPVGSARDYPLLSKWVIYGELACNGSCPDSSDEISPIYSLWATFIGLYIANYVVERSTGWALAHPLSVENYEKLKRQQMKPNFLDMVPWYSGTSADLFKTVFDLLVSVTVFLGRFDMRMMQAAMNKDCDGNKSKELLYDHFADKTDFWFDFMADTGDGGNSSYSVAKLLAQPFINVPLDNDSISLERGNILLIGGDLAYPNPSAFTYEKRLFCPFEYALQPPHWYKTDSISVNKPELPDGVSDLKHYDGPQCFLIPGNHDWFDGLNTFMRYVCHKSWLGGWFMPQKKSYFALQLPKGWWVFGLDLALHGDIDVYQFNFFSKLVKEKVGENDAVIIITHEPNWLLDWYWKDDTGKNMRHLIFEFLKGRCKLRMAGDLHHYMRHSCTQSDGPVHVPHLLVNGCGGAFLHPTHVFRCFSKFYGASYESKSAYPSFEDSSRIALGNILKFRKKNWQFDFIGGIIYFLLVFSLFPQCELGHILRGDSFSGHLGSFFGTVWSSFVYVTEQSYVSFTGVLMLLITAIMFVPSKISRRKRLLIGILHVSAHLMAALILMLLLELGIEICIQHKLLANSGYHTLYQWYKSVENEHFPDPTGLRDRIEQWTFGLYPACIKYLMSAFDIPEVMAVTRTNICRERNGSHFLEAEQAIYYASVFLYFWVLLNPCCIFGFWKLLIYIHQLASHTL

SEQ ID NO: 4819 - protein, 452 aa, Arabidopsis thaliana
MTSISSSDHPLPVSKKRLKPLILRDFLLDDLSSCSSNGFKSFPRLLNAEIQRSGMFHHNRRITCGLAFSHAVHKASTALLTAVKLLPFPSSVKSQSRDRDNKKGLFSRSFWKKLSRRELNVDVGEKERRTDDREEEIQRCRSFAEFLQESQDQLSDQIYYISPTDLFSGEATLSKDAVGDSSSFSSEDSEVTQSSSGVIVVMMSGDCVGSHVSDGSSLNDNTEIFLRGFESGFYGQYHSLPNVNLVHLKFECENEEKEQLSPISILDCPFQDDAISPPSHHKETYEKKQMRKRRRLESLVRLEPVDLEKRIEKYEERQDYKSHIIEIEEDQSEIRANRLFALVKSRIIEEQNQLLASHVVDNVLLDFFKENNNNETRDEDKLVEIVEEWVMRRQDDEYNMFMSWKVSEKREIYVKEMKWGCINGDEKEYVVEELGNGFLTSLVDELIHDISL

SEQ ID NO: 4820 - protein, 333 aa, Arabidopsis thaliana
MQSSNQISTEILRPLKKKIPNKSQRASGFSSRSTAEEVTHGVDGTGLTAIVTGASSGIGVETARVLALRGVHVVMAVRNTGAGAKVKEDIVKQVPGAKVDVMELELSSMESVRKFASEYKSAGLPLNLLINNAGIMACPFMLSKDNIELQFATNHLGHFLLTKLLLDTMKNTSRESKREGRIVNVSSEAHRYSYPEGVRFDKINDESSYSSIRAYGQSKLCNVLHANELAKQLKEDGVNITANSLHPGAIMTNLWGYFNSYLAGAVGAVAKYMVKSVPQGAATTCYVALNPQVAGVTGEYFSDSNIAKPIELVKDTELAKKLWDFSTKLTDSQ

SEQ ID NO: 4821 - protein, 255 aa, Arabidopsis thaliana
MPKQDMEKMELRKNFRNVWHTDLTHSIQNDTPYCCFALWCAPCASYLLRKRALYDDMSRYVCCAGYMPCSGRCGEAKCPQLCLATEVFCCFANSVASTRFLLQDEFQIQTTKCDNCIIGFMVCLSQVACIFSIVACIVGMDELSEASQILTCCSDMVYCTVCACMQTQHKMEMDKRDGKFGPQPMAVPPAQQMSRFDQATPPAVGYPPQQGYPPSGYPQHPPQGYPPSGYPQNPPPSAYSQYPPGAYPPPPAYPK

SEQ ID NO: 4822 - protein, 638 aa, Arabidopsis thaliana
MEALRIYLWSLCLSLCLIIYGANSDPLEDKRALLEFLTIMQPTRSLNWNETSQVCNIWTGVTCNQDGSRIIAVRLPGVGLNGQIPPNTISRLSALRVLSLRSNLISGEFPKDFVELKDLAFLYLQDNNLSGPLPLDFSVWKNLTSVNLSNNGFNGTIPSSLSRLKRIQSLNLANNTLSGDIPDLSVLSSLQHIDLSNNYDLAGPIPDWLRRFPFSSYTGIDIIPPGGNYTLVTPPPPSEQTHQKPSKARFLGLSETVFLLIVIAVSIVVITALAFVLTVCYVRRKLRRGDGVISDNKLQKKGGMSPEKFVSRMEDVNNRLSFFEGCNYSFDLEDLLRASAEVLGKGTFGTTYKAVLEDATSVAVKRLKDVAAGKRDFEQQMEIIGGIKHENVVELKAYYYSKDEKLMVYDYFSRGSVASLLHGNRGENRIPLDWETRMKIAIGAAKGIARIHKENNGKLVHGNIKSSNIFLNSESNGCVSDLGLTAVMSPLAPPISRQAGYRAPEVTDTRKSSQLSDVYSFGVVLLELLTGKSPIHTTAGDEIIHLVRWVHSVVREEWTAEVFDIELLRYTNIEEEMVEMLQIAMSCVVKAADQRPKMSDLVRLIENVGNRRTSIEPEPELKPKSENGASETSTPSEI

SEQ ID NO: 4823 - protein, 138 aa, Arabidopsis thaliana
MSSRLDQLVNKYNKSCENVSFAEHMILKDKYESLVIEHESLIKTLELLEKTHGFTVEDLVTKQKEALEKKEVIEKWENKFGEMEKKLKTVERSIEYIMSVDVQTGVDSDMSTSEDDDGNRRQRKGRLINSSDHDHFIL

SEQ ID NO: 4824 - protein, 452 aa, Arabidopsis thaliana
MASGVFEDEAEGTITINEYIERLDAEELAADLVLGGDEGDECTFPKGYMKRQAIFSCITCTPEGNAGICTACCLSCHDGHELLELWTKRNFRCDCGNSKFGTLACKLLPSKDIENSENSYNHNFKGLYCTCDRPYPDPNVEEQVEMIQCCLCEDWFHEEHLGLTPSDSVGSQIPRDEESEPIYEDFICQNCSPACSFLTLYPENLWVVAKVDSTGSANACSETIELDKNHMDSEPGQPENGTDAEKSVVGKCSETISDSEPGQPENGTEAEKSVVQKCSEKIDESEAGQPENSTEAEKFVVRKCSEKIDGSENVPAAGCVIRTDLNSCPEFEKKPLFLTKNWRNILCRCEKCLEMYKQRKVSYLLDAEDTIVEYEKKAKEKRTEKLEKQEGEALDLLNNLDHVSKVELLHGIKDFQDGLQGLMESAGPSKAITSADIEQMFSKLKNKRKRME

SEQ ID NO: 4825 - protein, 956 aa, Arabidopsis thaliana
MPHRTTYFFPRQFPDRGFDSFSLKNDHDKKKSSSNVGESFGFQRDNKSNGVGEDSNKEKESTVFSSNPLLSKSSAVSDLFSDDRKSEKKHQQQLAAFYEWLAEKKANLSRSSSTTTTHGRGVKPTRFSMSSDADEERELLLSSPADPAPLPATSSPDSIIDSARTVNIHERNIDRSFDREVSLPRMSSESSFAGSFFSGTTVDGNFSNFSSHTDARETSTTTLVSVNKEEEEVEVREQGKEQSLAQKSREGYYLQVTLAKWLSSQANLACESVHIQSTESISYRFWVSGCLSYSDKISDGFYSILGMDPYLWLMCNNSEDGKRIPSLLLLKETEPNDTSMEVVLIDRREDSRLKELEDKAHELYCSSDNMLVLVEKLGRLVAVYMGGNFQVEQGDLQKRWKLVSNRLKEFRKCIILPIGSLTMGLCRHRAILFKKLADYIGLPCRIARGCRYCKESHQSSCLVKIDDDRKLSREYVVDLIGEPGNVHDPDSSINGETQCQIPSPLQMSHLTDFSRPCVHSTSPCQTVESKTSRTLSENIQRSGSQGQVHKEFELPDNAGTVCCAHIDQTCCAKVSSMVLTESVLRALPLDIPNLSEEKIAPQETCKEETVLLEDPTAMKQPNLSVEPEIVEADTRKDKKGRLPVDAISPYLTIEPSLASDWLEVSWNELHIKERVGAGSFGTVHRAEWHGSDVAVKILSIQDFHDDQFREFLREVCKQAVAIMKRVRHPNVVLFMGAVTERPRLSIITEYLPRGSLFRLIHRPASGELLDQRRRLRMALDVAKGLNYLHCLNPPVVHWDLKSPNLLVDKNWTVKVCDFGLSRFKANTFIPSKSVAGTPEWMAPEFLRGEPTNEKSDVYSFGVVLWELITLQQPWNGLSPAQVVGAVAFQNRRLIIPPNTSPVLVSLMEACWADEPSQRPAFGSIVDTLKKLLKSPVQLIQMGGDKGVIPTKSAPIL

SEQ ID NO: 4826 - protein, 440 aa, Arabidopsis thaliana
MGQIPRFLSWRNMLVLSLAINFSLILKILKGDRERGDSWDRTAYVSIWPVVSTTASESSSLSSASCNYSKIEEDDDRIINLKFGDPTVYERYWQENGEVTTMVIPGWQSLSYFSDENNLCWFLEPELAKEIVRVHKVVGNAVTQDRFIVVGTGSTQLYQAALYALSPHDDSGPINVVSATPYYSTYPLITDCLKSGLYRWGGDAKTYKEDGPYIELVTSPNNPDGFLRESVVNSTEGILIHDLAYYWPQYTPITSPADHDVMLFTASKSTGHAGIRIGWALVKDRETARKMIEYIELNTIGVSKDSQLRVAKVLKVVSDSCGNVTGKSFFDHSYDAMYERWKLLKQAAKDTKRFSVPDFVSQRCNFFGRVFEPQPAFAWFKCEEGIVDCEKFLREEKKILTKSGKYFGDELSNVRISMLDRDTNFNIFLHRITSSFNSTL

SEQ ID NO: 4827 - protein, 135 aa, Arabidopsis thaliana
MDKFWTFLTALHSGAGPIVMLLYPLYASVIAMESTTKVDDEQWLAYWIIYSFLSLTELILQSLIEWIPIWYTVKLVFVAWLVLPQFQGAAFIYNRVVREQFKKHGVLRSTHSKPTKPNILHSIFPHREGHEAHSH

SEQ ID NO: 4828 - protein, 212 aa, Arabidopsis thaliana
MAASSAVTANYVLKPPPFALDALEPHMSKQTLEFHWGKHHRAYVDNLKKQVLGTELEGKPLEHIIHSTYNNGDLLPAFNNAAQAWNHEFFWESMKPGGGGKPSGELLALLERDFTSYEKFYEEFNAAAATQFGAGWAWLAYSNEKLKVVKTPNAVNPLVLGSFPLLTIDVWEHAYYLDFQNRRPDYIKTFMTNLVSWEAVSARLEAAKAASA

SEQ ID NO: 4829 - protein, 404 aa, Arabidopsis thaliana
MEEREGTNINNNITSSFGLKQQHEAAASDGGYSMDPPPRPENPNPFLVPPTTVPAAATVAAAVTENAATPFSLTMPTENTSAEQLKKKRGRPRKYNPDGTLVVTLSPMPISSSVPLTSEFPPRKRGRGRGKSNRWLKKSQMFQFDRSPVDTNLAGVGTADFVGANFTPHVLIVNAGEDVTMKIMTFSQQGSRAICILSANGPISNVTLRQSMTSGGTLTYEGRFEILSLTGSFMQNDSGGTRSRAGGMSVCLAGPDGRVFGGGLAGLFLAAGPVQVMVGTFIAGQEQSQLELAKERRLRFGAQPSSISFNISAEERKARFERLNKSVAIPAPTTSYTHVNTTNAVHSYYTNSVNHVKDPFSSIPVGGGGGGEVGEEEGEEDDDELEGEDEEFGGDSQSDNEIPS

SEQ ID NO: 4830 - protein, 651 aa, Arabidopsis thaliana
MPSRSISAPVPVLAPAPIVSSLVPAAPSGHQNKTTRIFPPFVVAGAGAGFSLFITLSVCFCKFSRKRSSPPAENASSSPRRPSPREFSYSSLRRATGSFSQANRLGQGGFGVVFRGTISGGENVAVKVMDSGSLQGEGEFQNELFFAAKLDSPHVVPVIGFSHDRKRRRLLLVYKLMDNGNLQDALLHRRCPELMDWNRRFLVAVNIADGIKHLHSLEPPVIHGDIKPSNVLLDSLFSAKIADFGLARLKAEQVEISVAPERDGDGSMVEEVESVVTTVTGYEDFNFGLVDQSPESVAKVPGSVSASPEATTVVSVSPEMGEKTDEDGGSVVVMKKGKESESKDWWWKQESNVERGRVKEYVMQWIGSEVKKERPSRSDWIEAAALSSSSSKKLEKKTSKRLDWWLSLEEEDENKKKKKRRMVREWWKDEYRRELAKKRKKKKKMTLEAEFCSDDGSSSVSQWRRGSGSGSSIDWWLDGLSGERWLRARGNSHDSVSGEIAKSCGISSTPSMRGTVCYAAPEYCNLDNNVSEKCDVYSYGVLLLVLISGRRPLEMTGSASEIQRANLMSWARKLARRGKLVDLVDQKLQNLDQEQAVLCIKVALLCLQRLPISRPSMKEVLGMLKGEVNLPELPSEFSPSPPLKTTRKQRR

SEQ ID NO: 4831 - protein, 188 aa, Arabidopsis thaliana
MDHTVCKQVQPVVRKAKKKHGKDEFDRIKQAEKKKRRLEKALATSAAIRAELEKKKQKRLEEQQRLDEEGAAIAEAVALHVLLGEDSDDSSRVKFGEEKGFTMDLFRDERTNYVPRQSCASYAVQGIGFVSNGYGLGDSNWSPFTRRGAWDNNMGISADLIAAQAVSALQISENADGNAFVFNGMFRG

SEQ ID NO: 4832 - protein, 191 aa, Arabidopsis thaliana
MDHTLCKQVVQPVTRKVKKHGKDEFDRIKQAEKKKRRLEKALATSAAIRAELEKKKQKRLEEQQRLDEEGAAIAEAVALHVLLGEDSDDSSRVKFGEETGFGMDLFRDERTNYVPRQSCASYAVQGIGFVSNGYGLGDSNWSVSYKPFMKDVWDNNMVISADLIAAQAVSSLQISEDADRNAYVFETMFGG

SEQ ID NO: 4833 - protein, 450 aa, Arabidopsis thaliana
MEPRVGNKFRLGRKIGSGSFGEIYLGTNIHTNEELAIKLENVKTKHPQLLYESKLYRILQGGTGVPNVKWFGVEGDYNVLVMDLLGPSLEDLFNFCSRKLSLKSVLMLADQMINRVEFFHSKSFLHRDLKPDNFLMGLGRRANQVYIIDFGLAKKYRDSTTHQHIPYRENKNLTGTARYASMNTHLGIEQSRRDDLESLGYILMYFLKGSLPWQGLKAGTKKQKYERISEKKVSTSIEALCRGYPSEFASYFHYCRSLRFDDKPDYAYLKRIFRDLFIREGFQFDYVFDWTILKYQQSQLTAPPSRALNPAVGTSAALPPGISNIDRYTGEEEGRPHMESSRRRVSGALDNSGNISNQPTSSSARDSMIPSSSLFAQSAGSSRRVTAVSGSRDNFPGSEELLQRSRTGDVSRGVIPRNSPGEAGKSTRRHYESVVKGIDNLQVSDEHHPH

SEQ ID NO: 4834 - protein, 489 aa, Arabidopsis thaliana
MSTVESSKPKIINGSCGYVLEDVPHLSDYLPGLPTYPNPLQDNPAYSVVKQYFVDADDSVPQKIVVHKDGPRGIHFRRAGPRQKVYFESDEVHACIVTCGGLCPGLNTVIREIVSSLSYMYGVKRILGIDGGYRGFYAKNTVSLDSKVVNDIHKRGGTILGTSRGGHDTTKIVDSIQDRGINQVYIIGGDGTQRGASVIFEEIRRRGLKVAVIGIPKTIDNDIPVIDKSFGFDTAVEEAQRAINAAHVEAESIENGIGVVKLMGRYSGFIAMYATLASRDVDCCLIPESPFYLEGEGGLFEYIEKRLKESGHMVLVIAEGAGQDLMSKSMESMTLKDASGNKLLKDVGLWLSQSIKDHFNQKKMVMNLKYIDPTYMIRAVPSNASDNVYCTLLAQSAVHGAMAGYTGYISGLVNGRQTYIPFYRITEKQNHVVITDRMWARLLSSTNQPSFLGPKDVFDNKEKPMSALLDDGNCNGVVDVPPVTKEITK

SEQ ID NO: 4835 - protein, 59 aa, Arabidopsis thaliana
MEAMKMRLFVAVLVAAMAFSAVQQAAAVEAPAPSPTSDASLAIPAFFASVATLAFGFLF

SEQ ID NO: 4836 - protein, 358 aa, Arabidopsis thaliana
MSAFVSKYEDELIKTAKYIATPGRGILAADESTETIGKRFAGINVENTESNRQAYRELLFTSPGSYPCLSGVILFEETLYQKTSDGKPFVDLLMENGVIPGIKVDKGLVDLAGTNGETTTQGLDSLGARCQQYYEAGARFAKWRAFFKIGATEPSVLSIQEDARVLARYAIICQENGLVPIVEPEVLTGGSHDIKKCAAVTETVLAAVFKALNYHHVLLEGTLLKPNMVTPGSDSPKVAPELIAEYTVTALRRTVPPAIPGIVFLSGIQREEQATLNLNAMNKLDVLKPWTLTFSFGGALQQSAIKAWAGKPENVAKAQAKFLTRCKANKDATLGKYTGWASGDSAAFENLVVIGYRY

SEQ ID NO: 4837 - protein, 455 aa, Arabidopsis thaliana
MNPEEQKMESASDLGKLFIGGISWDTDEERLQEYFGKYGDLVEAVIMRDRTTGRARGFGFIVFADPSVAERVIMDKHIIDGRTVEAKKAVPRDDQQVLKRHASPMHLISPSHGGNGGGARTKKIFVGGLPSSITEAEFKNYFDQFGTIADVVVMYDHNTQRPRGFGFITFDSEESVDMVLHKTFHELNGKMVEVKRAVPKELSSTTPNRSPLIGYGNNYGVVPNRSSANSYFNSFPPGYNNNNLGSAGRFSPIGSGRNAFSSFGLGLNQELNLNSNFDGNTLGYSRIPGNQYFNSASPNRYNSPIGYNRGDSAYNPSNRDLWGNRSDSSGPGWNLGVSVGNNRGNWGLSSVVSDNNGYGRSYGAGSGLSGLSFAGNTNGFDGSIGELYRGSSVYSDSTWQQSMPHHQSSNELDGLSRSYGFGIDNVGSDPSANASEGYSGNYNVGNRQTHRGIEA

SEQ ID NO: 4838 - protein, 442 aa, Arabidopsis thaliana
MLKIKRVPTVVSNYQKDDGAEDPVGCGRNCLGACCLNGARLPLYACKNLVKSGEKLVISHEAIEPPVAFLESLVLGEWEDRFQRGLFRYDVTACETKVIPGKYGFVAQLNEGRHLKKRPTEFRVDKVLQSFDGSKFNFTKVGQEELLFQFEAGEDAQVQFFPCMPIDPENSPSVVAINVSPIEYGHVLLIPRVLDCLPQRIDHKSLLLAVHMAAEAANPYFRLGYNSLGAFATINHLHFQAYYLAMPFPLEKAPTKKITTTVSGVKISELLSYPVRSLLFEGGSSMQELSDTVSDCCVCLQNNNIPFNILISDCGRQIFLMPQCYAEKQALGEVSPEVLETQVNPAVWEISGHMVLKRKEDYEGASEDNAWRLLAEASLSEERFKEVTALAFEAIGCSNQEEDLEGTIVHQQNSSGNVNQKSNRTHGGPITNGTAAECLVLQ

SEQ ID NO: 4839 - protein, 2574 aa, Arabidopsis thaliana
MAESISSDLEDQGMVVDGGNRDVEVGKIPVMAFRPSHEAKLRELLHNICLHEIKLCSDAAKEFVKLLKGETGGDLLRLYFQSSPNFAELLEAWKLRHEKQGLSYIFSLIQTILSHPEGKDRSTDIGRAIDQFGRLLVEEKLDDIYKELNSKEGKQQSAALSLLASIVRRGPGMASEIAKKFDFKGFAKLAEYNTQGTEKVKKHSTRKAFVGFAISFLEVGKPGLLSSVLNKKEMYSKVLPGLGKDDDDTVASVLSTLKDKILVEESLISPGLRSVLFGIVTLKHLASISAREDAGIVNELAHDVLVKVCTDPSNGLMPDAKRKLRGNSDRLLMLMKGLRAAEIGYHRDLLLAIVRGRPSLASDFLDEFPYNVEDFSSPSWFSSISLAANLVSSVRTSCSFDFLNPDQRATPPSGGSDVQTIMKCICPRPFSRSLITKGMLHSDFLVKHGTLRFLLETLRLLDSFLTAWNLCSSHRCSVEQIQISLERNVMGEVSSFFPDSQVLLIVLKSLDGSSGTQKLSLKREAELDSGLVGRKKRIKRSEKDVLEEEAVDIVIGGVGSDKDIFLAEDNMDAHMTDQEDAEKEYLGIVSDIWISELCSNPIDSVEEAEMCFHIKLLDALKIYVRAVPNELEGSFDIFMKFLSNSFGMPVELQRALLSLLSEYISWTPKSQSDRGPTRIPPLMHKHLRVFINLLLFSPHNGVKDLAYNLAVAAMNSTGAFENNPSEIGAWFLFLPCFEKIKLPLELQEAVQSMSSVVVSFLCDAVSTVGNNLFKHWDIVRSSLSHLKGVSIGFSPLIICLLQKCVRLLNSESKTSLPEKSAISLYVCSTLKYLLQTQVDSKLLSCLIQSVLSEVVDESKDSLCEWRPLRMLLCFSQSLSNEKPIILHSRRTTGLPADSSFAETLDEIKRLVRSISPDEIAGIVKAFSSALICATPESILQNFASVMDVSWAFYGTPFSFLQSITFLEENFLGNLSKLSPDLFASGSEFTGSGNLCEGTVDSEIDFSGHSSVTEEIRSKMDNRDMESSAFSIFLKQAPFPVLLNAIMSMDISCLPEFPRISELLLLKVSQPKSGSIDSNIQLILFWLFQIRSSYKVQPAPVLHQLSEICLRLMKNLFSQISEPELVSGPSSNKLPASFAKWKHQVAETVLCHPVVMALLESPLDCGTLPPVQNVEIFSETSLTMGRLVFSEIDQHILNLLVSTCEHFLFDEKPPNLWKEDLRKNKSIIAFKDLVERLLLEFRVKFELCVGSQSYVSLLQPAQLIHALLRFISPFKLFNIAHSMLSKIDEEGLTSPNSSIILSLGLGIAGGAFEMLVLYSHQPTAKRGVYDLLWELEEKNYASNIIEKVYSMACKFSTSLDLDSADICLLKVCGGIFRGKHNQNYAVDPLVLKISLIVGRTPEDLIIHCINRASITRAKILFYLVESSPLHLLVFGHFFFSMLSKKQDDSALTDDQFIMLLPAVLSYLTSVIAKLEKPCNRCLDITSVYSNILINGFLQWPRFLARCIFEEKHEEILLSTTEDMETMFNASLIGKAVRMFQYHFSLTESPTKEDDLFKVFNSMFPLSSTGKEMLDYEIKEVDVQSVDQILNVAIRVVAKVTVSRICLFPEDSSMCHLKRAAGTCVKESSSKIGCNRAILSKPLLDALVNSWQCVVKKSDGSFKGNYEGKQDRCWSLCKSLENFILRSILQFLESMCEELVQLDSLPFLDRLMKSVLLYRFEDSKTLKILREIFSLLSRGKYSYAPYIQRLIYHSRFTPTISSLSISSSNTGELFRPVSSILNHLIILSPDSVRVKRCCLEAPKYAKQLEIVKILRVLLSNCGKDSGMKELLSDLHFLLLCSYGATLREIDLEIYKLMHDIKLIEAEQTLNVSETDYLWGKAALKIREGLSQDASDVCQVDLVEDVRQGLIKENLCVDPKICALTVLFFPYQRTTEKSENFYLYDDPINEVPVFSFNFQLIVLGYIEPVEFASLGLLAVAFVSMSSADLGMRKLGYETLQIFLDALEMGKDIVEGNILAFPICTEDFNWFCKGLMNCRKNKHVTGLRLLLMYVQNGVEEPWQRIPTVSAIFAAETSMILLDPSHEHYVPINKLLKSSSTLKLRGIPLFHDFFWSSAVNFRSQRFWELRLVYLGLKSDDDVQIYIKNSILETVISFSSSPLADDETKRLILQVVRKSVKFHKIARHLVENCGLFSWCSSFISNFTTKPIGDKDLHLVVVLEIITDVLASRNITEWLQRFGLEGLMEISSRLYKLLGGGLVSVQENGTSVDLILQILSATLKISQKRNMYQPHFTITIEGIFQLFEGVANFGSPQVEASAESGLITILMSTPPVDILCMDVDKLRRFLLWGTSTALKSDFKKGSKPSESHEDTKILIEGPQEETMVAKFLRWLSASVILGKSYSKASDSDPTFLSKTKPETLLTSLEYFKKRNLEDSMQNSEHIIGEVIVHLQQFLSTNYMFLLPSVVFALSLMLLHNDLGTGESDGDYKLIKSLCSKISSPPEAIPGWRWSYYQAWRDLSSEQATDLDKINELHACQHLLLIFSAMLGETPQESQQVLLRKSFDMSHVFEWERSLVET

SEQ ID NO: 4840 - protein, 250 aa, Arabidopsis thaliana
MRRRPGIGGLQKAAAARDQYRLLGENVAKLRTDMMKEQLSTFRSQLEEFARKHKNDIRKNPAFRAQFHEMCANIGVDPLASNKGFWAELLGIGDFYYELGVQIIEVCMLTRSHNGGLISLQELCNHLRQRRKKDREAVTEDDCLRAISKLKVLGSGFEVITIGKKKLVRSVPTELNKDHNQILELAQGQGFVIVEEVQRRLSWTSGRVIDALETLLEEGLAMIDNGHKDGKCRYWFPCVSSVYSSIGSDT

SEQ ID NO: 4841 - protein, 453 aa, Arabidopsis thaliana
MDTDLISNLPDDVLGKILSLVPTKLAAATSVLSKRWRNLLPLVDSLDFDETMLFYPDNKDGEDEASSYESGQRRRHSFSHFVDKTLALLSNAPLTEKFSLKCYHEDDGARINRWIRTALERGCLELNLEAANYLPIDSQYFTSNTLVKLTISDGFYPGGHLLPFGGVFFPALKTLTLVSVCFTSVEMINFFIHGCPALEELFLCVWMQYMSSPNVKRVTITSDFDDDIQRPSMVLKTPSLVYLDYSSYVAGNYYVVLDSLVEARLDLRLYEPIIYDEDGLWNAEVFGNITNLIEAIRTIKILHLSPSSLEVFYYCCDLPVLEDLVNLSIESDKEKGWEVMPRLLNKSPNLQTLVVKGLVHRVTYCCGDACACIRMKDREIVSCLSRCRVKVLKILGYGGSFRELKQMRHFLGKLKCLETVKVGVKEGSKKSNYLVANVMALPRVSSKCKIQFI

SEQ ID NO: 4842 - protein, 532 aa, Arabidopsis thaliana
MVSTSKIKSVDFYSDPEVVGFASRVCALSLSFDLSDIELFRCYFLGFKMIVSHFDFGIVAKRVASKKIPRDLTEASLSGAGLSIIAALSMIFLFGMELNNYLAVSTSTSVIVDRSADGDFLRLDFNISFPSLSCEFASVDVSDVLGTNRLNVTKTIRKFSIDSNMRPTGSEFHAGEVLSLINHGDETGEEIVEDSVPLTGRNFDTFTHQFPILVVNFYAPWCYWCNLLKPSWEKAAKQIKERYDPEMDGRVILAKVDCTQEGDLCRRNHIQGYPSIRIFRKGSDLKDDNAHHDHESYYGDRDTESLVKMVVSLVEPIHLEPHNLALEDKSDNSSRTLKKAPSTGGCRVEGYMRVKKVPGNLMVSARSGSHSFDSSQMNMSHVVNHLSFGRRIMPQKFSEFKRLSPYLGLSHDRLDGRSFINQRDLGPNVTIEHYLQIVKTEVVKSNGQALVEAYEYTAHSSVAHSYYLPVAKFHFELSPMQVLITENSKSFSHFITNVCAIIGGVFTVAGILDSILHHSMTLMKKIELGKNF

SEQ ID NO: 4843 - protein, 334 aa, Arabidopsis thaliana
MSTRRNGISKHQRGDKFCGEGPNWILIAGGALLSTLSIRFGYKLKQSLDSKPQSNGSAGLKPNGTSERQKSTSCCLHSTTSSCTQNNDFCCFRSIPGTESVEGKEVTSEQMISASDTSLPLVTVPAPSSKENGVMWATSPDRLELPPRPYNHNSNCSDSPCVSETSSDIFSKREVIQKLRQQLKRRDDMIQEMQEQILELQNSYNAQTAHSSHLQAQLDTLNRDLFESEREVQRLRKAIADHSVGCGADSNGKTSPVGPWNGGFMDSESNYESQEKSLRDGERVEMLRKEVSELKEVIDGKEYLLRSYKEQKIELSQKVKELQQRLDSQLQNLL

SEQ ID NO: 4844 - protein, 260 aa, Arabidopsis thaliana
MTSNQRMLFYSCIAKGTVILAEFASKEEPGIEDLALRCIENVPPHHSMISHTVHKRTYALIIDGLFSYFAILDEVVAKSESVWLFNRLKSATESLMEDGSTADSLDNPTQHCLQSKLDPVFAEIAAIGGNHNKDLELEFGSPRSIAREIKSNNQSLDSSKGRKGGALMPLLGKPLRVLKNKKRLQTEAKSEGHWNEKKMDLGGGGKGVRNGLIHDHHHRQKAKQIWRKHVWIVLMFDLCICLVLFGIWLWICQGFQCIDG

SEQ ID NO: 4845 - protein, 359 aa, Arabidopsis thaliana
MEISKYKAVLALVMLQFTSAGVALFTKAAFMEGLNPTVFVVYRQAIATLFICPISFISAWRKENKPSLGVRGFWWVALTAVIGVTVNQNAYFKGIDLSSSSMACAMTNLIPAVTFIISIIVGFESIKRRSMKSVAKVIGTGVCVGGAMAMTFLRGPKLLNALLNQDNTAWLLGCFFLLISTFAWSLWLILQVPIASHCPDHLYTSACTCFIATIASFLVALALGNTHLPPWKLDSFLKLSCCIYSGFQLAISFFLQAWIVSQKGPVFSALFNPLSAVIVTFFGALYLKEQTYLGSLLGALAIILGLYIVLWGKSEDYQEESTDLKLENEHNTSSQSDIVSIMIGDKAFRSSELLEPLLM

SEQ ID NO: 4846 - protein, 516 aa, Arabidopsis thaliana
MAEKKELGLPKPSINLKEQLARTTLKNLRLQGHTYIELREDGKRFVFFCTLCLAPCYSDTILLGHLNGNLHKERLACARITLLGTNPWPFSDGVLFFDSSTGEEEEKSPVSGGEGVPDTLEHCSDDERFAIVKYDNNKTNGDNVPAAVTDDEPSHAADDLLISGVLIKERTLDVEAKFIGFGRIAARLFETKGRTTWIDKLWCEWLGDEGPSDEEKATIPEHDFAIVTFSYFYNLGRLGLLDDPGRLLTSSQSESGNGEDSGRKRKKSFSDPEDTSESLCNQYDSSEEVSSGHNSNSSRDLIADYDDSLMSKRVVKNRTVRRELRRQQRIFSERICEVCKQKMLPGKDAAAILNMKTGNLACGSRNLLGAFHLFHVSCVVHWFLFCESEILGNKMVSGKGKKRCTKHSGQTGVKWNELANDVSWQIFSVFCPECQGTGINIEGAVIERDTFPLSQTWRFQVKVSEGRKAWVKNPERLKNCSTGFHFPQQAEETEQIPVQEERVQMMKLVRFYRVEL

SEQ ID NO: 4847 - protein, 496 aa, Arabidopsis thaliana
MASGSSGRVNSGSKGFDFGSDDILCSYDDYTNQDSSNGPHSDPAIAASNSNKEFHKTRMARSSVFPTSSYSPPEDSLSQDITDTVERTMKMYADNMMRFLEGLSSRLSQLELYCYNLDKTIGEMRSELTHAHEDADVKLRSLDKHLQEVHRSVQILRDKQELADTQKELAKLQLVQKESSSSSHSQHGEDRVATPVPEPKKSENTSDAHNQQLALALPHQIAPQPQVQPQPQPQQHQYYMPPPPTQLQNTPAPVPVSTPPSQLQAPPAQSQFMPPPPAPSHPSSAQTQSFPQYQQNWPPQPQARPQSSGGYPTYSPAPPGNQPPVESLPSSMQMQSPYSGPPQQSMQAYGYGAAPPPQAPPQQTKMSYSPQTGDGYLPSGPPPPSGYANAMYEGGRMQYPPPQPQQQQQQAHYLQGPQGGGYSPQPHQAGGGNIGAPPVLRSKYGELIEKLVSMGFRGDHVMAVIQRMEESGQPIDFNTLLDRLSGQSSGGPPRGW

SEQ ID NO: 4848 - protein, 348 aa, Arabidopsis thaliana
MGVDYYKVLQVDRSANDDDLKKAYRKLAMKWHPDKNPNNKKDAEAKFKQISEAYDVLSDPQKRAVYDQYGEEGLKGNVPPPNAATSGASYFSTGDGSSSFRFNPRSADDIFAEFFGFSTPFGGGGGGTGGQRFASRMFGDDMYASFGEGAGGGGAMHHHHHHHHHAAARKVAPIENKLPCSLEDLYKGTTKKMKISREIVDVSGKAMQVEEILTIGVKPGWKKGTKITFPEKGNEHPGVIPADLVFIIDEKPHPVFTREGNDLIVTQKVSLADALTGYTANIATLDGRTLTIPITNVIHPEYEEVVPKEGMPLQKDQTKKGNLRIKFNIKFPARLTAEQKAGFKKLIG

SEQ ID NO: 4849 - protein, 219 aa, Arabidopsis thaliana
MMNRLFGKPKQEANALQTLDKLNETLEMLEKKEKVLLKKAGAEVEKAKEYSRAKNKRAAIQCLKRKRLYEGQVEQLGNFQLRIHDQMIMLEGAKATTETVDALRSGASAMKAMQKATNIDDVDKTMDEINEQTENMKQIQEALATPMGAAADFDEDELAAELDELESEELESQLLQPATTAPPLPSVPVPAGRQPARPVPQKRTAEEEELAALQAEMAL

SEQ ID NO: 4850 - protein, 816 aa, Arabidopsis thaliana
MDIGCKVLVFFTCFLTVTAEIYIVTMEGEPIISYKGGDNGFEATAVESDEKIDTTSELVTSYARHLERKHDMLLGMLFVEGSYKKLYSYKHLINGFAAHVSPDQAEMLRRAPGVKSVDRDWKVRKLTTHTPQFLGLPTDVWPTGGGYDRAGEDIVIGFIDSGIFPHHPSFASHHTTVPYGPHPSYKGKCEEDPHTKISFCNGKIIGAQHFAEAAKAAGAFNPDIDFASPMDGDGHGSHTAAIAAGNNGIPVRMHGYEFGKASGMAPRARIAVYKALYRLFGGFVADVVAAIDQAVHDGVDILSLSVGPNSPPATTKTTFLNPFDATLLGAVKAGVFVAQAAGNGGPFPKTLVSYSPWITTVAAAIDDRRYKNHLTLGNGKMLAGIGLSPSTRPHRSYKMVSANDVLLGSSGMKYNPSDCQKPEVLNKKLVEGNILLCGYSFNFVAGSASIKKVAETAKHLGAAGFVLVVENVSPGTKFDPVPSCIPGILITDVSKSMDLIDYYNVTTSRDWMGRVKDFKAEGSIGDGLEPILHKSAPEVALFSARGPNTKDFSFQDADLLKPDILAPGSLIWSAWSANGTDEANYIGEGFALISGTSMAAPHIAGIAALVKQKHPQWSPAAIKSALMTTSTVIDRAGRPLQAQQYSETETVTLVKATPFDYGSGHVNPSAALDPGLIFDAGYEDYIGFLCTTPGIDAHEIKNFTNTPCNFKMVHPSNFNTPSIAISHLVRTQTVTRRVTNVAEEEETYTITSRMEPAIAIEVSPPAMTVRAGASRTFSVTLTVRSVTGAYSFGQVTLKGSRGHKVTLPVVAMGQRR

SEQ ID NO: 4851 - protein, 983 aa, Arabidopsis thaliana
MSVSMRDLDPAFQGAGQKAGIEIWRIENFIPTPIPKSSIGKFFTGDSYIVLKTTALKTGALRHDIHYWLGKDTSQDEAGTAAVKTVELDAALGGRAVQYREVQGHETEKFLSYFKPCIIPQEGGVASGFKHVVAEEHITRLFVCRGKHVVHVKEVPFARSSLNHDDIYILDTKSKIFQFNGSNSSIQERAKALEVVQYIKDTYHDGTCEVATVEDGKLMADADSGEFWGFFGGFAPLPRKTANDEDKTYNSDITRLFCVEKGQANPVEGDTLKREMLDTNKCYILDCGIEVFVWMGRTTSLDDRKIASKAAEEMIRSSERPKSQMIRIIEGFETVPFRSKFESWTQETNTTVSEDGRGRVAALLQRQGVNVRGLMKAAPPKEEPQVFIDCTGNLQVWRVNGQAKTLLQAADHSKFYSGDCYVFQYSYPGEEKEEVLIGTWFGKQSVEEERGSAVSMASKMVESMKFVPAQARIYEGKEPIQFFVIMQSFIVFKGGISSGYKKYIAEKEVDDDTYNENGVALFRIQGSGPENMQAIQVDPVAASLNSSYYYILHNDSSVFTWAGNLSTATDQELAERQLDLIKPNQQSRAQKEGSESEQFWELLGGKAEYSSQKLTKEPERDPHLFSCTFTKEVLKVRILLKSFFVTEIYNFTQDDLMTEDIFIIDCHSEIFVWVGQEVVPKNKLLALTIGEKFIEKDSLLEKLSPEAPIYVIMEGGEPSFFTRFFTSWDSSKSAMHGNSFQRKLKIVKNGGTPVADKPKRRTPASYGGRASVPDKSQQRSRSMSFSPDRVRVRGRSPAFNALAATFESQNARNLSTPPPVVRKLYPRSVTPDSSKFAPAPKSSAIASRSALFEKIPPQEPSIPKPVKASPKTPESPAPESNSKEQEEKKENDKEEGSMSSRIESLTIQEDAKEGVEDEEDLPAHPYDRLKTTSTDPVSDIDVTRREAYLSSEEFKEKFGMTKEAFYKLPKWKQNKFKMAVQLF

SEQ ID NO: 4852 - protein, 237 aa, Arabidopsis thaliana
MKKTNFVSSASGGDPMIRLTFVQVLELEKELEIKRKRLEMIKQKRLTLKSEVRFLRRRYEHLKQDQTLETSPEMLRLSESGGLEVPRKPSGERKKQSGVRASVPCFDLKLKNTICNEKEALANNVASCDLDKKRKRSRGSDVLTFPVSLPDLNGEGNTSGTDKVPGFDLNQISREEEEPEVNGEHMVAEAMKNAMLDNRISDLHVERKLPICGDVEKELNRAVKRKVTWQDPVALSV

SEQ ID NO: 4853 - protein, 644 aa, Arabidopsis thaliana
MDVATDTTRRRLLPSDKNNAVVATRRPRTMEVSSRYRSPTPTKNGRCPSPSVTRPTVSSSSQSVAAKRAVSAERKRPSTPPSPTSPSTPIRDLSIDLPASSRRLSTGRLPESLWPSTMRSLSVSFQSDSVSVPVSKKERPVSSSSGDRTLRPSSNIAQKHKAETTSVSRKPTPERKRSPLKGKNNVSDLSENSKPVDGPHSRLIEQHRWPSRIGGKITSNSLNRSLDLGDKASRGIPTSGPGMGPSLRRMSLPLSSSSRPLHKTSSNTSSYGGLVSPTKSEDNNIARTSGAQRLLSAGSLDRATLATAVARLHPLPAPGSRPASPSRTSFLSSSSISRGMSTSRGVSPSRGLSPSRGLSPTRGLSPSRGLSPSRGTNTSCFARPSTPPSRGISPSRIRQTTTSTQSSTTTSVLSFITDVKKGKKASYIEDVHQLRLLHNRYLQWRFAIARAESVMYIQRLTSEETLFNVWHAISELQDHVTRQRIGLQQLKLEIKLNSLLNDQMVSLEDWATLERDHVSSLVGAISDLEANTLRLPATGGTKADTESLKAAMSSALDVMQAMGSSIWSLLSKVEEMNIMVTELAVVVTKESSMQGKCEDLLASTAIMQIEECSLRTHLIQTRREEGEDAETPPPLLPLSKFPWP

SEQ ID NO: 4854 - protein, 316 aa, Arabidopsis thaliana
MSVSLSVMSFNLHDDLPEESPNSWLKRKDLCLTVITSYSPIVLCTQQGVKSQLDYLQQGLPAYDQFGISRTGPGDANDEHCTIFFNKEKVELLEGGTFWLSESPSVPGSTAWGSAVPCIATWATFQLKGAEPPGFSFQIVNTNLDEISPRARRRSALLTWQHIASLPPTLPVVYCGGFNTQKESTTGRFLLGRSREHGVVGDMRDAWPSARVRKNVALIRTYHDFKGDKQGTVEFLKLIFRALCLCWDRQTQDLHTDWILYRGRSIVPVMCEIVNDKIDDLYPSSHYPVFAEFMLPRSVRMLEPTPPVSAPAQEES

SEQ ID NO: 4855 - protein, 441 aa, Arabidopsis thaliana [sequence omitted]

SEQ ID NO: 4856 - protein, 571 aa, Arabidopsis thaliana
MKFMKLGSKPDTFESDGKFVKYAVSDLDSDVTIHVGEVTFHLHKFPLLSKSNRMQRLVFEASEEKTDEITILDMPGGYKAFEICAKFCYGMTVTLNAYNITAVRCAAEYLEMTEDADRGNLIYKIEVFLNSGIFRSWKDSIIVLQTTRSLLPWSEDLKLVGRCIDSVSAKILVNPETITWSYTFNRKLSGPDKIVEYHREKREENVIPKDWWVEDVCELEIDMFKRVISVVKSSGRMNNGVIAEALRYYVARWLPESMESLTSEASSNKDLVETVVFLLPKVNRAMSYSSCSFLLKLLKVSILVGADETVREDLVENVSLKLHEASVKDLLIHEVELVHRIVDQFMADEKRVSEDDRYKEFVLGNGILLSVGRLIDAYLALNSELTLSSFVELSELVPESARPIHDGLYKAIDTFMKEHPELTKSEKKRLCGLMDVRKLTNEASTHAAQNERLPLRVVVQVLYFEQLRANHSPVASVAASSHSPVEKTEENKGEEATKKVELSKKSRGSKSTRSGGGAQLMPSRSRRIFEKIWPGKGEISNKSSEVSSGSSQSPPAKSSSSSSRRRRHSIS

SEQ ID NO: 4857 - protein, 873 aa, Arabidopsis thaliana
MSDSDKELENQIIEAGEKLIDPPSSLDELLSFLDKLFVSLAEVEQSPPDSMQNALTPLMKGLVGGKLFKHSDVDVKVAVAACISEITRITAPDAPYDDDQMKEVFKLIVSSFEDLVDKSSRSYAKRISILETVAKVRSCVVMLDLECDALLIEMFQHFLKAIRDHHSGNVFSSMENIMTLVLEESEDIPSEMLSPILHSVKKDDEISQVSRRLAEQVLSNCASKLKTYLTEAVKSSGVPLDKYSNIVASICEGTFSALQQDQVVANEKEDSQGHIKRETEVEKAAEISTPERTDAPKDESGKSGVSNGVAQQNDSSVDTDSMKKQDDTGAKDEPQQLDNPRNTDLNNTTEEKPDVEHQIEEKENESSSVKQADLSKDSDIKEETEPAELLDSKDVLTSPPVDSSVTAATSSENEKNKSVQILPSKTSGDETANVSSPSMAEELPEQSVPKKTANQKKKESSTEEVKPSASIATEEVSEEPNTSEPQVTKKSGKKVASSSKTKPTVPPSKKSTSETKVAKQSEKKVVGSDNAQESTKPKEEKKKPGRGKAIDEESLHTSSGDNEKPAVSSGKLASKSKKEAKQTVEESPNSNTKRKRSLGQGKASGESLVGSRIKVWWPMDQAYYKGVVESYDAAKKKHLVIYDDGDQEILYLKNQKWSPLDESELSQDEEAADQTGQEEDASTVPLTKKAKTGKQSKMDNSSAKKGSGAGSSKAKATPASKSSKTSQDDKTASKSKDSKEASREEEASSEEESEEEEPPKTVGKSGSSRSKKDISSVSKSGKSKASSKKKEEPSKATTSSKSKSGPVKSVPAKSKTGKGKAKSGSASTPASKAKESASESESEETPKEPEPATKAKSGKSQGSQSKSGKKRKR

SEQ ID NO: 4858 - protein, 462 aa, Arabidopsis thaliana
MASLMLSLGSTSLLPREINKDKLKLGTSASNPFLKAKSFSRVTMTVAVKPSRFEGITMAPPDPILGVSEAFKADTNGMKLNLGVGAYRTEELQPYVLNVVKKAENLMLERGDNKEYLPIEGLAAFNKATAELLFGAGHPVIKEQRVATIQGLSGTGSLRLAAALIERYFPGAKVVISSPTWGNHKNIFNDAKVPWSEYRYYDPKTIGLDFEGMIADIKEAPEGSFILLHGCAHNPTGIDPTPEQWVKIADVIQEKNHIPFFDVAYQGFASGSLDEDAASVRLFAERGMEFFVAQSYSKNLGLYAERIGAINVVCSSADAATRVKSQLKRIARPMYSNPPVHGARIVANVVGDVTMFSEWKAEMEMMAGRIKTVRQELYDSLVSKDKSGKDWSFILKQIGMFSFTGLNKAQSDNMTDKWHVYMTKDGRISLAGLSLAKCEYLADAIIDSYHNALLYWETPIEL

SEQ ID NO: 4859 - protein, 821 aa, Arabidopsis thaliana
MRGVFIVIVTCLVFLPDPLRAGVASIGSITPGFGGSQMNYINNDGIFLESNNSAFGFGFVTTQDSVTLFTLSIIHKSSTKLIWSANRASPVSNSDKFVFDDNGNVVMEGTEVWRLDNSGKNASRIELRDSGNLVVVSVDGTSIWESFDHPTDTLITNQAFKEGMKLTSSPSSSNMTYALEIKSGDMVLSVNSLTPQVYWSMANARERIINKDGGVVTSSSLLGNSWRFFDQKQVLLWQFVFSDNKDDNTTWIAVLGNNGVISFSNLGSGASAADSSTKIPSDLCGTPEPCGPYYVCSGSKVCGCVSGLSRARSDCKTGITSPCKKTKDNATLPLQLVSAGDGVDYFALGYAPPFSKKTDLDSCKEFCHNNCSCLGLFFQNSSGNCFLFDYIGSFKTSGNGGSGFVSYIKIASTGSGGGDNGEDDGKHFPYVVIIVVVTVFIIAVLIFVAFRIHKRKKMILEAPQESSEEDNFLENLSGMPIRFAYKDLQSATNNFSVKLGQGGFGSVYEGTLPDGSRLAVKKLEGIGQGKKEFRAEVSIIGSIHHLHLVRLRGFCAEGAHRLLAYEFLSKGSLERWIFRKKDGDVLLDWDTRFNIALGTAKGLAYLHEDCDARIVHCDIKPENILLDDNFNAKVSDFGLAKLMTREQSHVFTTMRGTRGYLAPEWITNYAISEKSDVYSYGMVLLELIGGRKNYDPSETSEKCHFPSFAFKKMEEGKLMDIVDGKMKNVDVTDERVQRAMKTALWCIQEDMQTRPSMSKVVQMLEGVFPVVQPPSSSTMGSRLYSSFFKSISEDGGATTSSGPSDCNSENYLSAVRLSGPR

SEQ ID NO: 4860 - protein, 765 aa, Arabidopsis thaliana
MMVGTQNLGGSLPPLNSPKSYGITKPLSLAGPSSADIKRNVELEKYLVDEGLYESKDDTMRREEVLGRIDQIVKHWVKQLTQQRGYTDQMVEDANAVIFTFGSYRLGVHGPGADIDTLCVGPSYVNREEDFFIILHDILAEMEEVTELHPVPDAHVPVMKFKFQGIPIDLLYASISLLVVPQDLDISSSSVLCEVDEPTVRSLNGCRVADQILKLVPNFEHFRTTLRCLKYWAKKRGVYSNVTGFLGGVNWALLVARVCQLYPNAIPSMLVSRFFRVYTQWRWPNPVMLCAIEEDELGFPVWDRRKNHRDRYHLMPIITPAYPCMNSSYNVSQSTLRVMTEQFQFGNNILQEIELNKQHWSSLFEQYMFFEAYKNYLQVDIVAADAEDLLAWKGWVESRFRQLTLKIERDTNGMLMCHPQPNEYVDTARQFLHCAFFMGLQRAEGVGGQECQQFDIRGTVDEFRQEVNMYMFWKPGMDVFVSHVRRRQLPPFVFPNGYRRPRQSRHQNLPGGKSGEDGSVSHSGSVVERHAKRKNDSEMMDVRPEKPEKRASLSPQSLDIVSPENSAITTGWTPPVCNLRRPPSEEIEADNLNTECTELTDLARNECNSGSEQVLEVDSMAVVQECSDPAEPLGKCVTPDSVDVVACVSGQEENLDRNLRSVSISGTDSPLLPSRSCGQNRDYEGFGFPAANSDPMGKKNLYSQSGMSEDLQSNSLVSGMEKSEDRARSESFQKSQIRHAIDVKKTGDFNSNCCVGQTTESRSFW

SEQ ID NO: 4861 - protein, 473 aa, Arabidopsis thaliana
MDNNNNNNTFSSLDNVMTNQNPLLMDFIPSREDSTSFSTMLPWNTIRSDPLQMGGFDIFNSMLTNKYLSSSPRSIDVQDNRNVEFMAPPPHPPPLHPLDHLRHYDDSSNNMWGFEANSEFQAFSGVVGPSEPMMSTFGEEDFPFLISNKRNNELSLSLASDVSDECSEISLCAATRLASEQASCSSKDISNNVVTQGFSQLIFGSKYLHSVQEILSHFAAYSLDYSSRGTESGAASSAFTSRFENITEFLDGDSNNSEAGFGSTFQRRALEAKKTHLLDLLQMVDDRYSHCVDEIHTVISAFHAATELDPQLHTRFALQTVSFLYKNLRERICKKIISMGSVLERGKDKTQETSMFHQHCLLQQLKRKNHQIWRPQRGLPEKSVSVLRNWMFQNFLHPYPKDSEKHLLAIRSGLTRSQVSNWFINARVRLWKPMIEEMYAEMNKRKLNNSHIQPNGPTLRMPKSVMMSQAMHK

SEQ ID NO: 4862 - protein, 526 aa, Arabidopsis thaliana
MGLEVGSLCFKLKDGGLTSRTNSFKRDDTNRHQNSPKSTMERSLSFNSWEVPKETKTDSDFEVLETKKSTPNTLNGRNCERIQIKKPTVTPPEPFVFFSPRPVTELDAAATTLQKVYKSYRTRRNLADCAVVVEELWWRTLEGAALDLSSVSFFGEEKHETAVSKWARARKRAAKVGKGLSKDEKAQKLALQHWLEAVSPHNLNIFVTSYQRQVPYLTSKAIIEYTLMIHLLKLQIDPRHRYGHNLHFYYDVWSASKSTQPFFYWLDIGDGKDVNLEKHPRSVLQKQCIRYLGPMEREAYEVIVEDGRLMYKQGMTLINSTEEAKSIFVLSTTRNLYVGIKKKGLFQHSSFLSGGATTAAGRLVARDGILEAIWPYSGHYLPTEDNFKEFISFLEEHNVDLTNVKRCSVNEEYSSFKSTADEEEERKEVSEEVEIPSEKEERARPVFDPVKRLSCKWTSGYGPRIGCVRDYPMELQAQALEQVSLSPRVSPANSYGPIPSPRPSPKVRVSPRLAYMGIPSPRAVKC

SEQ ID NO: 4863 - protein, 457 aa, Arabidopsis thaliana
MPSSATSTYLLSLKQVSLTASSPLLLQLKDRFFHQPKLLNMGFSTGKRKSRDEEEDRVSFFASEFPMDDLNDDVLERVLSWLPTSCFFRMSSVCKRWKSSQTSKSFKLACSQIPTRDPWFFMIDNDSNSSSFVFDSTENSWKNLNRRDFLHHHRQDFIPVASSGGLLCYRCSISGDFLLRNPLTGSSRDIPSQDNNNNKPLQAVAMTTTTVTPSSYTLVTISGEIPNLSFKIYESNADSWSKDQELESVKNNDSSLHDDYDTDSGTVYFLSKQGNVVVASNNLQRSPSKQYSSVITVTDEAEIVYFLSSYGTIVACDLTKRCFTELPKLLPPFLEYSIDLVECEGTMYVILLSEFFESASLRIWRLDNNREWVQVGMLPPALSHELYGKKGDINCVGGAGNKILVCFNASPPEVYCRYFVYDLVAEEWNELPKCFKDGEAVDFVSALSFQPRIEATV

SEQ ID NO: 4864 - protein, 1757 aa, Arabidopsis thaliana
MDSQDHKAPGFVDIVKSWIPRKSESSNMSRDFWMPDQSCPVCYECDAQFTVFNRRHHCRLCGRVFCAKCAANSIPSPSDETKDSHEEPERIRVCNYCYKQWEQGIVPPDNGASIISLHFSSSPSARSVASTTSNSSNCTIDSTAGPSPRPKMNPRASRRVSSNMDSEKSEQQNAKSRRSSDHYGHVLDSSDNQVEFFVNSSGRSDGEADDDDDYQSDFAQSYAQGNDYYGAINLDEVDHIYGSHEAHDVGVKIEPNISGFPPDQDLDSLNTETIDKTRQQENGWNDVKEGSPPCEESFEPEVVDFESDGLLWLPPEPENEEDEREAVLSDDDGDEGDRGDWGYLRPSNSFNEKDFHSKDKSSGAMKNVVEGHFRALVAQLLEVDNLPMVNEGDEEGWLDIITSLSWEAATLLKPDTSKSGGMDPGGYVKVKCIPCGRRSESMVVKGVVCKKNVAHRRMTSKIEKPRLLILGGALEYQRISNQLSSFDTLLQQEMDHLKMAVAKIDSHNPDILLVEKSVSRFAQEYLLAKDISLVLNIKRSLLERISRCTGAQIVPSIDQLTSPKLGYCDLFHVEKFVETHVSPCQVAKKMAKTLMFFDGCPKPLGCTILLKGAHEDELKKVKHVIQYGVFAAYHLALETSFLADEGASIHELPLQTPITVALPDKPSMVNRSISTIPGFTVSSAEKSPTTELRGEPHKANGDLTGNFTSSKTHFQGKLDGNDRIDPSERLLHNLDTVYCKPPETITSKDDGLVPTLESRQLSFHVEEPSVQKDQWSVLSGATEQVTDGGYTNDSAVIGNQNFNRQEQMESSKGDFHPSASDHQSILVSLSTRCVWKGSVCERAHLLRIKYYGSFDKPLGRFLRDNLFDQDQCCPSCTMPAEAHIHCYTHRQGSLTISVKKLPELLPGQREGKIWMWHRCLKCPRINGFPPATRRIVMSDAAWGLSFGKFLELSFSNHAAASRVANCGHSLHRDCLRFYGFGRMVACFRYASINIYAVTLPPAKLYFNYENQEWLQKESKEVIKKAEVLFNEVQEALSQISAKTMGAGSKGSTPNKIKLSLEELAGLLEQRKKEYKDSLQQMLNVVKDGQPTIDILLINKLRRLIIFDSYAWDECLAGAANMVRNNYLEAPKNSAPKVMGRNVSLEKLSDEKVKSIPTHVAICNDSLLQDADYETCLNQGKSFADTSGKFAIPEDVGSDRPPDCRMEFDPSEGGKDNFVESSQVVKPAHTESQFQATDLSDTLDAAWIGEQTTSENGIFRPPSRAASTNGTQIPDLRLLGSESELNFKGGPTNDEHTTQVQLPSPSFYYSLNKNYSLNSRKHIMAEDRPVYVSSYRELEWRSGARLLLPLGCNDLVLPVYDDEPTSIIAYALTSSEYKAQMSGSDKSRDRLDSGGSFSLFDSVNLLSLNSLSDLSVDMSRSLSSADEQVSQLLHSSLYLKDLHARISFTDEGPPGKVKYSVTCYYAKEFEALRMICCPSETDFIRSLGRCRKWGAQGGKSNVFFAKSLDDRFIIKQVTKTELESFIKFGPAYFKYLTESISTKSPTSLAKILGIYQVSSKHLKGGKEFKMDVLVMENLLFKRNFTRLYDLKGSTRARYNPDTSGSNTVLLDQNLVEAMPTSPIFVGSKAKRLLERAVWNDTSFLASIHVMDYSLLVGVDEERNELVLGIIDFMRQYTWDKHLETWVKTSGLLGGPKNSTPTVISPQQYKKRFRKAMTAYFLMVPDQWSPAAVVPSNSSSAEVKEEEEKDNPQAVGNKS

SEQ ID NO: 4865 - protein, 362 aa, Arabidopsis thaliana
MDRPAVSGPMDLPIMHDSDRYELVKDIGSGNFGVARLMRDKQSNELVAVKYIERGEKIDENVKREIINHRSLRHPNIVRFKEVILTPTHLAIVMEYASGGELFERICNAGRFSEDEARFFFQQLISGVSYCHAMQVCHRDLKLENTLLDGSPAPRLKICDFGYSKSSVLHSQPKSTVGTPAYIAPEVLLKKEYDGKVADVWSCGVTLYVMLVGAYPFEDPEEPKNFRKTIHRILNVQYAIPDYVHISPECRHLISRIFVADPAKRISIPEIRNHEWFLKNLPADLMNDNTMTTQFDESDQPGQSIEEIMQIIAEATVPPAGTQNLNHYLTGSLDIDDDMEEDLESDLDDLDIDSSGEIVYAM

SEQ ID NO: 4866 - protein, 376 aa, Arabidopsis thaliana
MAIRKEEESREEQSNSFLLDALYCEEEKWDDEGEEVEENSSLSSSSSPFVVLQQDLFWEDEDLVTLFSKEEEQGLSCLDDVYLSTDRKEAVGWILRVNAHYGFSTLAAVLAITYLDKFICSYSLQRDKPWMLQLVSVACLSLAAKVEETQVPLLLDFQVEETKYVFEAKTIQRMELLILSTLEWKMHLITPISFVDHIIRRLGLKNNAHWDFLNKCHRLLLSVISDSRFVGYLPSVVAAATMMRIIEQVDPFDPLSYQTNLLGVLNLTKEKVKTCYDLILQLPVDRIGLQIQIQSSKKRKSHDSSSSLNSPSCVIDANPFNSDESSNDSWSASSCNPPTSSSSPQQQPPLKKMRGAEENEKKKPILHLPWAIVATP

SEQ ID NO: 4867 - protein, 342 aa, Arabidopsis thaliana
MAEDPSFLPKDGFVLKLPKKSSLVLRMVVLLFVMVCAVYICSICLKQIGVSPNYGFLNVEVFERPCPEPNIEPWDIPFVHYPKPKTYNRDECSCHPVRYFAILSMQRSGSGWFETLLNNHTNISSNGEIFSVKDRRANVSTIFETLDKVYNLDWLSSASKNECTSAVGFKWMLNQGLMKHHEEIVEYFKTRGVSAIFLFRKNLLRRMISVLANSYDRDAKLLNGTHKSHTHSAKEAEILAGYKPMINTTLLINELRQIQEMTLKALTYFNTTRHILVYYEDVVKNLTRLDDVQEFLKVPKRKLKSRQVKIHGGSLSKHVQNWEEVMTTLKGTNFENFLHQEF

SEQ ID NO: 4868 - protein, 377 aa, Arabidopsis thaliana
MSVSELKERHAVATETVNNLRDQLRQRRLQLLDTDVARYSAAQGRTRVSFGATDLVCCRTLQGHTGKVYSLDWTPERNRIVSASQDGRLIVWNALTSQKTHAIKLPCAWVMTCAFSPNGQSVACGGLDSVCSIFSLSSTADKDGTVPVSRMLTGHRGYVSCCQYVPNEDAHLITSSGDQTCILWDVTTGLKTSVFGGEFQSGHTADVLSVSISGSNPNWFISGSCDSTARLWDTRAASRAVRTFHGHEGDVNTVKFFPDGYRFGTGSDDGTCRLYDIRTGHQLQVYQPHGDGENGPVTSIAFSVSGRLLFAGYASNNTCYVWDTLLGEVVLDLGLQQDSHRNRISCLGLSADGSALCTGSWDSNLKIWAFGGHRRVI

SEQ ID NO: 4869 - protein, 306 aa, Arabidopsis thaliana
MEEEKKKSRVLIIGATGRLGNYLTRFSIESGHPTFALIRNTTLSDKLKSLSDAGVTLLKGSLEDEGSLAEAVSKVDVVISAIPSKHVLDQKLLVRVIKQAGSIKRFIPAEYGANPDKTQVSDLDHDFYSKKSEIRHMIESEGIPYTYICCGLFMRVLLPSLVQPGLQSPPTDKVTVFGDGNVKAVFVNDVDVAAFTIKTIDDPRTLNKTLYLSPPGNICSMNDLVELWEGKIEKKLEKTFATENQLLKKIKETPYPDNMEMVFIYSVFIKGDHTYFDIESCGGVNGTELYPDVKYMTVSEFLDTLL

SEQ ID NO: 4870 - protein, 221 aa, Arabidopsis thaliana
MDPIKFQHLKMEKSRGILNFQAIRSFTSLFRLFELLLLVILISKLSFPSVKISGDIFKEAAVFLVSPRFVFFIGNAIVITLLAKSGRYSSSHEPSKTATEAASNDLYQEFLHKSEKKKPVVYATKTEQLKKPSGGKRVSFGRSQSHKAFEAVKPLESTNGEKNMKRYVSEKHMRVCDSDKKVVVRVKKPEDGMSNEQFRTKIEAFIARQKRIQKDEEHLII

SEQ ID NO: 4871 - protein, 159 aa, Arabidopsis thaliana
MESSSSGTTSSTIQTSSGSEESLMEQRKRKRMLSNRESARRSRMKKQKLLDDLTAQVNHLKKENTEIVTSVSITTQHYLTVEAENSVLRAQLDELNHRLQSLNDIIEFLDSSNNNNNNNMGMCSNPLVGLECDDFFVNQMNMSYIMNQPLMASSDALMY

SEQ ID NO: 4872 - protein, 711 aa, Arabidopsis thaliana
MPALACVDTSFVPPAYAFSDTAGDVFIPASSPTSAAVVVDRWSPSLSSSLYRIDGWGAPYFIANSSGNISVRPHGSETLPHQDIDLLKIVKKVTGPKSSGGLGLQLPLIVRFPDVLKNRLECLQSAFDYAIKSQGYDSHYQGVYPVKCNQDRFVVEDIVKFGSSFRFGLEAGSKPEILLAMSCLCKGSPDAFLVCNGFKDAEYISLALLGRKLALNTVIVLEQEEELDLVIELSQKMNVRPVIGLRAKLRTKHSGHFGSTSGEKGKFGLTTTQIVRVVRKLRQSGMLDCLQLLHFHIGSQIPSTSLLSDGVAEAAQLYCELVRLGAHMKVIDIGGGLGIDYDGSKSGESDLSVAYSLEEYAEAVVASVRVVCDRSSVKHPVICSESGRAIVSHHSVLIFEAVSADKPMVHQATPGDIQFLLEGNEEARANYEDLYAAVMRGDHESCLLYVDQLKQRCVEGFKEGVLSIEQLASVDGLCEWVLKAIGASDPVHTYNINLSVFTSIPDLWGIDQLFPIVPIHKLDQRPGARGILSDLTCDSDGKINKFIGGESSLPLHELDKNGSGGRYFLGMFLGGAYEEALGGVHNLFGGPSVVRVSQSDGPHSFAVTRAVPGQSSADVLRAMQHEPELMFQTLKHRAEEMMHTKGGSEGENEEEEEDDEFNNVAASLDRSFHNMPYLATEQASPSNSLSAAISNLGFYYCDEDVYDYISA

SEQ ID NO: 4873 - protein, 59 aa, Arabidopsis thaliana
MAGLCSSLISEFCFSFANNLIGFMLGVIICHILDGSFPSLSFEFSRWVSPDRFLNLGFT

SEQ ID NO: 4874 - protein, 198 aa, Arabidopsis thaliana
MSASRFIKCVTVGDGAVGKTCLLISYTSNTFPTDYVPTVFDNFSANVIVDGNTINLGLWDTAGQEDYNRLRPLSYRGADVFLLAFSLVSKASYENVSKKWVPELRHYAPGVPIILVGTKLDLRDDKQFFAEHPGAVPISTAQGEELKKLIGAPAYIECSAKTQQNVKAVFDAAIKVVLQPPKNKKKKKRKSQKGCSIL

SEQ ID NO: 4875 - protein, 261 aa, Arabidopsis thaliana
MEDGELDFSNQEVFSSSEMGELPPSNCSMDSFFDGLLMDTNAACTHTHTCNPTGPENTHTHTCFHVHTKILPDESDEKVSTDDTAESCGKKGEKRPLGNREAVRKYREKKKAKAASLEDEVARLRAVNQQLVKRLQNQATLEAEVSRLKCLLVDLRGRIDGEIGSFPYQKPMAANIPSFSHMMNPCNVQCDDEVYCPQNVFGVNSQEGASINDQGLSGCDFDQLQCMANQNLNGNGNGSFSNVNTSVSNKRKGGHRASRAV

SEQ ID NO: 4876 - protein, 299 aa, Arabidopsis thaliana
MSSYMHPLLGQELHLQRPEDSRTPPDQNNMELNRSEADEAKAETTPTGGATSSATASGSSSGRRPRGRPAGSKNKPKPPTIITRDSPNVLRSHVLEVTSGSDISEAVSTYATRRGCGVCIISGTGAVTNVTIRQPAAPAGGGVITLHGRFDILSLTGTALPPPAPPGAGGLTVYLAGGQGQVVGGNVAGSLIASGPVVLMAASFANAVYDRLPIEEEETPPPRTTGVQQQQPEASQSSEVTGSGAQACESNLQGGNGGGGVAFYNLGMNMNNFQFSGGDIYGMSGGSGGGGGGATRPAF

SEQ ID NO: 4877 - protein, 549 aa, Arabidopsis thaliana
MDLMQMDKRLDSTEQVVEEIMRIHRSLPARPGIDEVEAAKGLIDNVEKEDQACLEAIARQRKSSEVPGELFMVLQEMKKGYVQFRSKEQIREALKLLDLESVHSLFDDFIQRASNCIASPSSNGSVSSRPPLPPATTTAARSDSQSSLNFSERAPVRPKDMVSRDDSFVTKSKPSSLYSDGFAAPPRRPQILDSTLTTGNDGEKLSLIKLASLIEVSAKKATQEINLQNKLTEQLEWLPDSLGKLSSLTSLDLSENHIVVLPNTIGGLSSLTKLDLHSNRIGQLPESIGELLNLVYLNLGSNQLSSLPSAFSRLVRLEELDLSCNNLPILPESIGSLVSLKKLDVETNDIEEIPYSIGGCSSLIELRADYNKLKALPEAIGKITTLEILSVRYNNIRQLPTTMSSLASLKELDVSFNELESVPESLCFATTLVKLNIGNNFADMVSLPRSIGNLEMLEELDISNNQIRVLPDSFKMLTKLRVFRAQENPLHIPPRDIAEKGPQAVVQYMNDLVETRNAKSLMVKPKKSWVQMCFFSKSNKRKQSSMEIV

SEQ ID NO: 4878 - protein, 211 aa, Arabidopsis thaliana
MSYDYLFKYIIIGDTGVGKSCLLLQFTDKRFQPVHDLTIGVEFGARMVTVDGRPIKLQIWDTAGQESFRSITRSYYRGAAGALLVYDITRRETFNHLASWLEDARQHANPNMSIMLIGNKCDLAHKRAVSKEEGQQFAKEHGLLFLEASARTAQNVEEAFIETAAKILQNIQDGVFDVSNESSGIKIGYGRTQGAAGGRDGTISQGGGCCG

SEQ ID NO: 4879 - protein, 421 aa, Arabidopsis thaliana
MSHSWDGLGEIASVAQLTGLDAVKLIGLIVKAANTAWMHKKNCRQFAQHLKLIGNLLEQLKISEMKKYPETREPLEGLEDALRRSYLLVNSCRDRSYLYLLAMGWNIVYQFRKHQDEIDRFLKIIPLITLVDNARIRERFEYIDRDQREYTLDEEDRHVQDVILKQESTREAASVLKKTLSCSYPNLRFCEALKTENEKLQIELQRSQEHYDVAQCEVIQRLIGVTQAAAAVEPDSEKELTKKASKKSERSSSMKTEYSYDEDSPKKSSTRAASRSTSNVSSGHDLLSRRASQAQHHEEWHTDLLACCSEPSLCFKTFFFPCGTLAKIATAASNRHISSAEACNELMAYSLILSCCCYTCCVRRKLRKTLNITGGFIDDFLSHVMCCCCALVQELREVEIRGAYGTEKTKISPPSSQFMEH

SEQ ID NO: 4880 - protein, 451 aa, Arabidopsis thaliana
MSRCFPFPPPGYVLNGIRDEAVIVSSIKGVEEKAKKEQRRKDRRSDKKDKKDKKERKEKKEKKEKKRKEREGKEVGSEKRSHKRRRKEDGAKVDLFHKLKESEVNCLEKSSLTVERELLQSTSQNSCDSTLNSNEMLPKQKEVQQPLDGRHNNNNNEKRVEKQQPLDGRHNNNNEKRVEKQQPLDGRHNNNNEKRIEKQQPLNGRHNNNNEKLMEKQQPLNGRHNNNNEKRIEKQQPLNGRHNNKEKQKEKQQPLDVRHNNNDSESIIRIRLPIRRQKDPEVMMTNKDQEKPGPSRGIKLDSSQLPTREPVNQHPCSTSAAEHASKPREEKRKDPIFRGKHGKEKISSSSTRETYQPPKSLCNCPPSMVLQFLDVVENWVPNTIERRVDLINSEDEECWWSMKKPPSSTTEICKQLNRENEIKQVGNTMGWPCARLLPEADVYALPYTVPF

SEQ ID NO: 4881 - protein, 610 aa, Arabidopsis thaliana
MKIVTYNVNGLRQRVSQFDSLLKLLDSFDADIICFQETKLRRQELTADLAIADGYESFFSCTRTSEKGRTGYSGVATFCRVKSASSSCETALPVTAEEGITGLVNSNSRGGKSETSTVAEGLEEYEKEELLMIDQEGRCVITDHGHFVVFNVYGPRAVADDADRIEFKHRFYGVLERRWECLLRQGRRVFVVGDLNIAPFAMDRCEAGPDFEKNEFRKWFRSLLVERGGSFSDVFRSKHPERKDAFTCWSSSSGAEQFNYGSRIDHILVAGSCLHQDEDKQGHSFLACHVKECDILTEYKRFKNENMPTRWKGGLVTKFKGSDHVPVFISFDDLPDIPEHSTPPLASRYLPMIYGFQQTLVSVFKKRRANEEAKAIEVSCSSSTQSNTSSICGDISTGPLRNCGSMGISLEKSCSFENKSTSGVTEAETVAATGSIDNLSDGIRASSVRALNISRDGDRKKARKIQSSQLSLKSFFTTNSKVNNVEDSSSSYVSSSPSSQVESITEPNVSGKEDSEPTTSTQEQDQTGSSAKQKNDAALMEWQRIQNLMQNSIPLCKGHKEACVARVVKKPGPTFGRRFYVCSRAEKQTVVISNGLHQNSETSKRVMRSK

SEQ ID NO: 4882 - protein, 520 aa, Arabidopsis thaliana
MEPNYEEDVFLAKYQSSELKIASEFLTNWLPFLSRDLCNDCAHVLSDRIRSLDPEHCSNGEVKAGSGSMVDNMESEEVDNMESEEVDNKMDNIYDGKLCVSHSLDSLKAGAFVFGSLSDSVSHAMPSSQSTVSEAASAQMSWADMGEEDGLEEEDQKENELGSHGVDVSPSVGDSMKTPEKRKLSREERERYRFMNVKKMKVFSCYEKVRGRSVNILEGLELHTGVFSAVEQKKIVDFVYELQEKGRRGELRERTFTAPHKWMRGKGRVTIQFGCCYNYAPDKAGNPPGILQRGDVDPMPSIFKVIIKRLVGWHVLPPTCVPDSCIVNIYEEDDCIPPHIDNHDFLRPFCTVSFLSECNILFGSNLKVLGPGEFSGSYSIPLPVGSVLVLKGNGADVAKHCVPAVPTKRISITFRKMDESKRPVGFTPEPDLEEIKPLPYEHTTPSTPADAVISSSRSSIDQNGSNHNNRTAHGGGSKYRRSRDYHSESRERSSSGQRRETSRHTPNRSYRPKVTSSDNV

SEQ ID NO: 4883 - protein, 211 aa, Arabidopsis thaliana
MGFSMFFSPENDVSHHSSPYASVDCTLSLGTPSTRLCNEDDERRFSSHTSDTIGWDFLNGSKKGGGGGGHNLLARRCANCDTTSTPLWRNGPRGPKSLCNACGIRFKKEERRASTARNSTSGGGSTAAGVPTLDHQASANYYYNNNNQYASSSPWHHQHNTQRVPYYSPANNEYSYVDDVRVVDHDVTTDPFLSWRLNVADRTGLVHDFTM

SEQ ID NO: 4884 - protein, 238 aa, Arabidopsis thaliana
MKMARASASASLIDGKIYVFGGCPEDADSSNWAEVFDPVYQTWGIFNTPKMAHSINQSVVIEEKKVYAVDEEDQSFSFLPSEGRIWKSGKKDSKVGSRHDWCVIGKLLYCRATRGRILWCQPDELDWKEVKGLEQLQLYLSGTRYIFRRTSDKRPSKTNVKYDIRKISSNSAGNIVIFGNAHIGDPECVELWSAEISMERREGGEIWGKIEWSNVVFKLDPLSNSYSVDVLFSASVHL

SEQ ID NO: 4885 - protein, 379 aa, Arabidopsis thaliana
MERKLVVLGIPWDIDSDGLKDYMSKFGDLEDCIVMKDRSTGRSRGFGYVTFASAEDAKNALKGEHFLGNRILEVKVATPKEEMRQPAKKVTRIFVARIPSSVSESDFRSHFERYGEITDLYMPKDYNSKQHRGIGFITFSSADSVEDLMEDTHDLGGTTVAVDRATPKEDDHPPRPPPVARMSRPPVAIAGGFGAPGGYGAYDAYISAATRYAALGAPTLYDNPATFYGRGEPTTRGIGNKIFVGRLPQEASVDDLRDYFGRFGHIQDAYIPKDPKRSGHRGFGFVTFAENGVADRVARRSHEICGQEVAIDSATPLDEAGPSAGASSMLSSSRPEYFGGYGGPMRAFGRMYGGMSLDDWGYGMPNARPSRPDRRYRPY

SEQ ID NO: 4886 - protein, 610 aa, Arabidopsis thaliana
MNTSVRAVLSSMKAPSKHDTTHHQDEKKKMESQGNGAVANSGKSLVNRRRANKEKKMDLLQDVDKLKRKLRQEENVHRALERAFTRPLGALPRLPSYLPRHTLELLAEVAVLEEEVVRLEEQVVNFRQGLYQEAVYISSKRNLESPNNNSLNENSPVRSTKHQRSKSMSQHEFNSMITPTKKHQQSLSRSISSRKLFSSDQTVNDRSGQRVVSGKQASPKSNLSSVTNTKPVDVRGKENQTSSNASKDKKNKESPEKKLGRFLTSVKKKKPLIKPEAAADKHSESTKLQLDDRLADQDKAQESVSGSSSEDKTLQSGNVANRVSEDLLKCLVTIILRISSSKDIVLDPYNNCSEWRTRELGAYKHFSSVDTSSVDLGRRINASFLIHRLKFLLNKLSVVNLDGLSHQQKLAFWINTYNSCVMNAFLEHGIPATPEMVVALMQKATIIVGGHSLNAITIEHFILRLPYHLKFTCPKTATHEEMRAHSTFGLEWSEPLVTFALACGSWSSPAVRVYTAANVEEELEAAKRDYLQASVGISKNNKLMLPKVLDWYLLDFAKDLESLLDWVCLQLPDKLREEATKCMERKNKESLMELVQVVPYDFSFRLLLHQ

SEQ ID NO: 4887 - protein, 580 aa, Arabidopsis thaliana
MKFMKLGSKPDSFQSEGDNVRYVSSELATDVIVIIGDVKFYLHKFPLLSKSARLQKLITTSTSSSNEENQIHHHHHEDEIEIAEIPGGPASFEICAKFCYGMTVTLNAYNVVAARCAAEFLEMYETVEKGNLVYKIEVFLNSSILQSWKDSIIVLQTTRALSPYSEELKLTGRCLDSIASRASIDTSKVEWSYTYSKKKNLDNGLRKPQAVPRDWWVEDLCDLHIDLYKRALATIEARGNVSADVIGEALHAYAIKRIPGFSKSSSVQVTDFAKYRALADSIIELIPDEKRSVSSSFLTKLLRASIFLGCDEVAGLKNRVGERLDEANLGDVLLYDVELMQSLVEVFLKSRDPREDDVTAKASVAKLVDGYLAEKSRDSDNLPLQKFLSLAEMVSSFPRQSHDGVYRAIDMFLKEHPEMNKSEKKRICRLMDCRKLSAEACAHAVQNERLPMRVVVQVLFFEQVRANNNGSSSTGNSTPEVIPASRSTNTTDQEDTECWDTEDIKALRGELANLRLAKNQQESHNQGKLMKGGGLGVSRVFSKLWSGKERSGDMISSSGTSSPGSVNDDSKSSSSTSKKH

SEQ ID NO: 4888 - protein, 87 aa, Arabidopsis thaliana
MEPQHTDDVLKHLEKQTELLKEAQKNMLQELQKLEVEHETMMRKLYELMNTHSLNKKKMEETQNVLEGRETIEASSPSTVTTNDEEH

SEQ ID NO: 4889 - protein, 432 aa, Arabidopsis thaliana
MGKPGGAKTRTAVCLSDGVFFLAGAFMSLTLVWSYFSIFSPSFTSLRHDGKPVQCSGLDMQFDPSEPGFYDDPDLSYSIEKPITKWDEKRNQWFESHPSFKPGSENRIVMVTGSQSSPCKNPIGDHLLLRCFKNKVDYARIHGHDIFYSNSLLHPKMNSYWAKLPVVKAAMLAHPEAEWIWWVDSDAIFTDMEFKPPLHRYRQHNLVVHGWPNIIYEKQSWTALNAGVFLIRNCQWSMDLIDTWKSMGPVSPDYKKWGPIQRSIFKDKLFPESDDQTALIYLLYKHKELYYPKIYLEAEYYLQGYWIGVFGDFANVTERYLEMEREDDTLRRRHAEKVSERYGAFREERFLKGEFGGRGSRRRAFITHFTGCQPCSGDHNPSYDGDTCWNEMIRALNFADNQVMRVYGYVHSDLSKTSPLQPLPFDYPNEAW

SEQ ID NO: 4890 - protein, 555 aa, Arabidopsis thaliana
MKSFCDNDDNNHSNTTNLLGFSLSSNMMKMGGRGGREAIYSSSTSSAATSSSSVPPQLVVGDNTSNFGVCYGSNPNGGIYSHMSVMPLRSDGSLCLMEALNRSSHSNHHQDSSPKVEDFFGTHHNNTSHKEAMDLSLDSLFYNTTHEPNTTTNFQEFFSFPQTRNHEEETRNYGNDPSLTHGGSFNVGVYGEFQQSLSLSMSPGSQSSCITGSHHHQQNQNQNHQSQNHQQISEALVETSVGFETTTMAAAKKKRGQEDVVVVGQKQIVHRKSIDTFGQRTSQYRGVTRHRWTGRYEAHLWDNSFKKEGHSRKGRQVYLGGYDMEEKAARAYDLAALKYWGPSTHTNFSAENYQKEIEDMKNMTRQEYVAHLRRKSSGFSRGASIYRGVTRHHQHGRWQARIGRVAGNKDLYLGTFGTQEEAAEAYDVAAIKFRGTNAVTNFDITRYDVDRIMSSNTLLSGELARRNNNSIVVRNTEDQTALNAVVEGGSNKEVSTPERLLSFPAIFALPQVNQKMFGSNMGGNMSPWTSNPNAELKTVALTLPQMPVFAAWADS

SEQ ID NO: 4891 - protein, 275 aa, Arabidopsis thaliana
MCIAVFLWQSHPLYPFLLFLNRDEDHNRATEALRWWEDGETVGGRDLVGGGTWLGCTRHGRLAFLTNFKEASSFPAAKSRGDLPLRYLQSEKSPAEFAEEIQDEISLYNGFNLVVAHVLSKSMIYITNRPPHGDKLVTQVSPGIHVLSNANLDSPWPKCLRLREGFQQLLAENGSGEFPVKTMVEEVMTNTVKDEETELPHVFTPETEYHLSSIFVDMQRPTGRYGTRSISAIIVKSHGDGGGDGEICFYERHLEEGDSWKEHTQQFVIIQNQSI

SEQ ID NO: 4892 - protein, 47 aa, Arabidopsis thaliana
MGSNTCGECGERAVSNEAERSIIQDIVTAVIVSRREDIYLTGIHILF

SEQ ID NO: 4893 - protein, 400 aa, Arabidopsis thaliana
MLSGLMNFLNACLWPRSDQQARSASDSGGRQEGLLWFRDSGQHVFGDFSMAVVQANSLLEDQSQLESGSLSSHDSGPFGTFVGVYDGHGGPETSRFINDHMFHHLKRFTAEQQCMSSEVIKKAFQATEEGFLSIVTNQFQTRPQIATVGSCCLVSVICDGKLYVANAGDSRAVLGQVMRVTGEAHATQLSAEHNASIESVRRELQALHPDHPDIVVLKHNVWRVKGIIQVSRSIGDVYLKRSEFNREPLYAKFRLRSPFSKPLLSAEPAITVHTLEPHDQFIICASDGLWEHMSNQEAVDIVQNHPRNGIAKRLVKVALQEAAKKREMRYSDLKKIDRGVRRHFHDDITVIVVFFDTNLVSRGSMLRGPAVSVRGAGVNLPHNTLAPCTTPTQAAAAGAS

SEQ ID NO: 4894 - protein, 836 aa, Arabidopsis thaliana
MEKTQMPVAREEKILVLVRLRPLNQKEIAANEAADWECINDTTILYRNTLREGSNFPSAYSFDKVYRGECPTRQVYEDGTKEIALSVVKGINCSIFAYGQTSSGKTYTMTGITEFAVADIFDYIFQHEERAFSVKFSAIEIYNEAIRDLLSSDGTSLRLRDDPEKGTVVEKATEETLRDWNHLKELLSICEAQRKIGETSLNERSSRSHQMIRLTVESSAREFLGKENSTTLMASVNFIDLAGSERASQAMSAGTRLKEGCHINRSLLTLGTVIRKLSKGRQGHINFRDSKLTRILQPCLGGNARTAIICTLSPARSHVELTKNTLLFACCAKEVTTKARINVVMSDKALLKQLQRELARLETELRNPASSPASNCDCAMTVRKKDLQIQKMEKEIAELRKQRDLAQSRLEDFMRMIEHNVASKPGTPHFGNHTDKWEDGSVSETSGVVDSDRRSFISDGMSTPLSISRAYVHSHSDDDDLDEDLPRRSEDLSEEYCREVQCIETEESVTVYNNKKDKRAEPENVLGCGEDANGETSVSQNVRVRSWNRRETVSGPSTPPENIGTGFLGRPESHKIAFPDLEFGSTVSRNDSMSSCGSDSTGTQSIRTPLGEEGGITSIRTFVEGLKEMAKRQGEVSNAEDSGKMRRDIGLDSMDREFERQRQEILELWQTCNISLVHRTYFYLLFKGDEADSIYIGVELRRLLFMKDSFSQGNQALEGGETLTLASSRKELHRERKMLSKLVGKRFSGEERKRIYHKFGIAINSKRRRLQLVNELWSNPKDMTQVMESADVVAKLVRFAEQGRAMKEMFGLTFTPPSFLTTRRSHSWRKSMPALF

SEQ ID NO: 4895 - protein, 226 aa, Arabidopsis thaliana
MRILCDACENAAAIIFCAADEAALCRPCDEKALHMRLDISKCSESVKRVQIVETSSLIWWIKMGTFCLQSLHLVVHMCNKLASRHVRVGLAEPSNAPCCDICENAPAFFYCEIDGSSLCLQCDMVVHVGGKRTHGRFLLLRQRIEFPGDKPKENNTRDNLQNQRVSTNGNGEANGKIDDEMIDLNANPQRVHEPSSNNNGIDVNNENNHEPAGLVPVGPFKRESEK

SEQ ID NO: 4896 - protein, 1055 aa, Arabidopsis thaliana
MASSSSRTRSSRPPSPASSTSSSHLSNRLIPRSNSTSASSLITSAAGIASRSMTPSRTFSDSGLIGSGSFGIGSPVPYPSEELLGDPMDDTISSERDSISVTVRFRPLSDREYQRGDEVAWYPDGDTLVRHEYNPLTAYAFDKVFGPQATTIDVYDVAARPVVKAAMEGVNGTVFAYGVTSSGKTHTMHGDQESPGIIPLAIKDVFSIIQDTPGREFLLRVSYLEIYNEVINDLLDPTGQNLRVREDSQGTYVEGIKEEVVLSPGHALSFIAAGEEHRHVGSNNFNLLSSRSHTIFTLMVESSATGDEYDGVIFSQLNLIDLAGSESSKTETTGLRRKEGSYINKSLLTLGTVIGKLSEGKATHIPYRDSKLTRLLQSSLSGHGHVSLICTITPASSSSEETHNTLKFASRAKSIEIYASRNQIIDEKSLIKKYQREISTLKLELDQLRRGMLVGVSHEELMSLKQQLEEGQVKMQSRLEEEEEAKAALMSRIQKLTKLILVSTKNSIPGYSGDIPTHQRSLSAGKDDKFDSLLLESDNLGSPSSTLALLSEGSLGFNHRRSSSKLNDENSPGAEFTQGVMTPDEIDLLVEQVKMLAGEIAFSTSTLKRLVDQSVNDPENSQTQIQNLEREIHEKQRQMRGLEQLIIESGEASIANASLVEMQQKVMSLMTQCNEKSFELEIKSADNCILQEQLQEKCTENKELHEKVNLLEQRLNAVSSEKSSPSCSNKAVSGEYADELKKKIQSQEIENEELKLEHVQIVEENSGLRVQNQKLAEEASYAKELASAAAVELKNLASEVTKLSLQNTKLEKELAAARDLAQTRNPMNGVNRKYNDGARSGRKGRISSSRSSGDEFDAWNLDPEDLKMELQVRKQREVALESALAEKEFIEDEYRKKAEEAKRREEALENDLANMWVLVAKLKKDNGALPEPNGTDPGRELEKSQSHAVLKERQVSSAPRQPEVVVVAKTEETPKEEPLVARLKARMQEMKEKEMKSQANGDANSHICKVCFESPTAAILLPCRHFCLCKSCSLACSECPICRTKISDRLFAFPS

SEQ ID NO: 4897 - protein, 554 aa, Arabidopsis thaliana
MADTMVAHMDRHNKIDVEISEDDKRLTKLCSLKKKAINATNKFKHSMTKKGRRHSRVACVSIVDEIDTEELQAVDAFRQALILDELLPSKHDDHHMMLRFLRARKFDLEKAKQMWSDMLNWRKEYGADTIMEDFDFKEIEEVVKYYPQGYHGVDKEGRPIYIERLGQVDATKLMKVTTIDRYVKYHVKEFEKTFNVKFPACSIAAKRHIDQSTTILDVQGVGLSNFNKAAKDLLQSIQKIDNDNYPETLNRMFIINAGCGFRLLWNTVKSFLDPKTTAKIHVLGNKYQTKLLEIIDANELPEFLGGKCTCADKGGCMRSDKGPWNDPEIFKLVQNGEGRCLRRSLSGIEEKTIFEYNNETKKKCEPEETHKQSAAEMEKKFIDTNVDAAAAADWPTKLNKAEKNPTDLKDVYSAVNPLERKGYLYGSVMALLMGIVGVMRLTKNMPRRLTEANVYSREGSAVYQDGVTVMSKQEYIAMVKKITDLEEKCKSMEAQAAFYMEREKTLDAALRRIDQLELQLSETNKALDETMTRQHEIMAFIEKKKKKKRKFLLF

SEQ ID NO: 4898 - protein, 277 aa, Arabidopsis thaliana
MDSFSTQKPKSRKMKKRLAKKSRVEIILDLFFRAIEIVVVLVTLAKLSYELVVTFEDSSVASVILANRSLAFVIGNAIVIALIAKSGILLNQEHDPKCKSNDLYEDFVLESSRRGGFSQDEMRSGEKQSEAENEAKQSITENKAKENEEKQSITESRVKKSVTEKKTKRIISEKKVKQSKPEKLTKQSTSVNREKQSEVEHKDITMTIEKQNLTEKRQIQSYQRSKSENLKVLEKSSCGRLKRSETDASAERFDSDDELRYKIESFIARQRRNQTDE

SEQ ID NO: 4899 - protein, 864 aa, Arabidopsis thaliana
MVVLRKTSLLVFFLFLLLLLESTFEQQTSSLNEKSALLLLRSSLGLRSRDWPVKGNPCLNWNGIKCDQNGRVTKINISGFRRTRIGNQNPEFSVGSLVNLTRLASFNASRFYLPGPIPALFGSSLLTLEVLDLSSCSITGTIPESLTRLSHLKVLDLSKNAINGDIPLSLTSLQNLSILDLSSNSVFGSIPANIGALSKLQRLNLSRNTLTSSIPPSLGDLSVLIDLDLSFNGMSGSVPSDLKGLRNLQTLVIAGNRLSGSLPPDLFSLLSKLQIIDFRGSGFIGALPSRLWSLPELKFLDISGNHFSDMLPNTTVSFDSTVSMLNISGNMFYGNLTLLLTRFQVVDLSENYFEGKIPDFVPTRASLSNNCLQGPEKQRKLSDCTLFYSKKGLTFNNFGQHEEKKSSKTSWLSHTKIVILAAVGGSILLMLILIVLPITVSFCVRRRNRSSTSNHPRGRHNGVGPLPPDETLPSRGGVSINFGSLGSSFTYQQLLNATKEFSDSNLIKKGQSGDLFKGVLENGVQIVVKRISLESTKNNEAYLTELDFFSRFAHPRIIPFVGKSLESATHKFLVYKYMLNRDLPSSLFYKSNSLVDNGLRSLDWITRLKIALGVAEGLAYLHHDCSPSVVHRDIQASSILLDDKFEVRLGSFSKACHQENNGRPRKIARLLRLSQSSQESVPGSAATATCAYDVYCFGKILLELITGKLGISSCKETQFKKILTEIMPYISSQEKEPVMNILDQSLLVDEDLLEEVWAMAIVARSCLNPKPTRRPLMRHIVQALENPLRVVREDSSESERFRTTGSSRGSSSSGRIFGSWRQSVSDPVAAGTSSLLSQAEGLATGSSARGSSRGASSRRSMKDV

SEQ ID NO: 4900 - protein, 337 aa, Arabidopsis thaliana
MFKKMSATTSKTDQKAALDIASWLFNVVTSVGIILVNKALMATYGFSFATTLTGLHFGTTTLLTTFLTWLGYIQPSQLPWPDLLKFVLFANFSIVGMNVSLMWNSVGFYQIAKLSMIPVSCLLEVMLDNVRYSRDTKLSILLVLAGVAVCTVTDVSVNLNGFLAAAIAVWSTALQQYYVHYLQRKYSLGSFNLLAHTAPVQAASLLLVGPFLDYWLTNQRVDAYNFSFVSLFFLILSCSIAVGTNLSQFICIGRFTAVSFQVLGHMKTILVLVLGFTFFGKEGLNLQVVLGMLIAILGMIWYGNASSKPGGKERRSLSIPITKSQKLSETNESDEKV

SEQ ID NO: 4901 - protein, 3184 aa, Arabidopsis thaliana
MEKLVKEGPTLLQLHKWEPSQFQLKLSEFREAFISPSRQLLLLLSYHSEALLLPLVAGRSIGSEVSLSGDNEELNSPSCSGGSDPEKIESPCGSGVGSGEPGFVDNCSSSCNSFPFIFDAKSVAWGSCGDTYNRHKDPLFRELLFVSGNHGVTVHAFCCTKDLSDKAKGKPNGELRHGEWVEWGPSRLSQKSEPERVSSSDGSKQWMQSFLIDLETTVIDGTRQSRFPEKSAFPGSAEVVSFSILNTDLPFSNLLFQDNSILPKDNMPEDGNVNDNNFLVASDPTALDEKSRADMPVNNVSVNSLYRCIKVFSSDAHSLIGFVMELSDCASTPRRNENERSKGKRNIFVAKLFSWGIEWVSLVKFGESSIGPTNEWADFRLSDNFVICLSVSGLIFLYDVNSGDFISHGDILQTCGRGLHSSSDRQEATAEADQLSDFQNRAPSMSKTCIVGSTDRRKFRKLIVASHTPLIAAVDENGLVYVLCVNDFVSKEYHMAAEPIPDLLHLGLGSLVGWKIGGMDIGQKKVHHPSSSGSRGEDAFSRRDLSFSASEISMSDPCLERQQNNFDRRAGYSGSWLSGFSAQPKTNGLKLEKFRRDSHVTRKMFLSAEKLGLDDNICFSPYGFTHFSRKYTNKDDRSCKIFHYSLQTHMTARDDSYLNYDVNKNSIQGAEENFIGESVGCSFQGFLFLVTCDGLSVFLPSISITSNYPTIEAIEYLQPFQTTVMGYRGRDDLAAGESRFPWQVEVIDRVILFEGPEVADHLCLENGWDLKIVRLRRLQMALDYLKYDDINESLKMLGNVKLAEEGMLRVLFSAVYLLSRKDRNDNEISAVSRLLGLATMFATEMIRRYGLLEYRKDVYMFDSKPRTQILSLPAVSLNIDVMENSRRLSEMGYLLEITRNIQSRITRKFKKLGKGNNEKSLNLVDPNSLQDDSQLEIVPDPASAESRQLDTSLFDTNEELALTPMGMMTAGQIIDERSYASGLVPQGIVEEKKVLPLENPKEMMARWKANNLDLKTVVKDALLSGRLPLAVLQLHLQHSKDVVEDGEHHDTFTEVRDIGRAIAYDLFLKGEPGVAIATLQRLGEDVEACLNQLVFGTVRRSLRYQIAEEMRKLGFLRPYEDNVLERISLIERLYPSSHFWETYLARRKELLKAALPFDSSEISLHLGGSSLFQHLKIECGEVDGVVLGSWTKINESASEHAPDETDAVAGYWAAAAVWSNAWDQRTFDHIVLDQPLVMGVHVPWDSQLEYYMCHNDWDEVLKLLDLIPEDVLYDGSLQIALDGPKQSSGVNYSVSSRSEYICSIEEVDAVLMDVPYIKIFRLPGDIRCSLWLTTLMEQELARKLIFLKEYWENALDVVYLLARAGVILGNCEVSFKEETCTPSLDLCLSIKKGGANVDTLNAVHKLFIHYCTQYNLPNLLDLYLDHHELVLDNDSLSSLQEAVGDSHWAKWLLLSRIKGREYDASFSNARSIMSRNGAPNSEPSVPEIDEMVCTVDDIADGAGEMAALATMMCAPVPIQKSLSTGSVNRHTNSSAQCTLENLRSFLQRFPTLWSKLVSACLGEDISGNLLRTKTKNVLSEYLNWRDGVFFSTARDTSLLQMLPCWFPKAVRRLVQLYIQGPLGWLSFSGYPTGEYLLHRGVEFFINVDDPTEISAISWEAIIQKHIEEELHHTKTEGTELGLEHFLHRGRPLAAFNAFLEHRVEKLKLEDQSGSSIHGQRNMQSDVPMLLAPLTQSDESLLSSVIPLAITHFGDSVLVASCAFLLELCGLSASMLRIDVASLRRISSFYKSNGNADMAHQKSLKRSMFHSVSSEDDLMGSLARALANEYAYPDISSVPKQKQNPSISGSQPGLPLMLVLHHLEQASLPEIGVGRKTSGYWLLTGDGDGSELRSQQTSASLHWSLVTLFCQMHKIPLSTKYLAMLARDNDWVGFLSEAQLGGYPFDTVLNVASKEFGDQRLKAHILTVLRYANSKKKATTSFSDDPSRGLSCSPSEGGAYVSAELFRVLAYSEKLKNPGEYLLSKAKEFSWSILALIASCFPDVSPLSCLTIWLEITAARETSSIKVNDITTKIAENIGAAVVSTNSLPTDARGVQFHYNRRNPKRRRLTAHTSVDLLASANSLNISAGKTFCSHRTEAAEDEKAEDSSVIDDSSDEHASLSKMVAVLCEQRLFLPLLKAFDLFLPSCSLLPFFRALQAFSQMRLSEASAHLGSFWGRVKEESMHFQSNTAKDVNFGASWISRTAVKAADAVLSACPSPYEKRCLLQLLAATDFGDGGSAATYYRRLYWKVNLAEPSLRENDLDLGNESLDDGSLLTALEKNRQWEQARNWAKQLETIGATWTSSVHHVTETQAESMVAEWKEFLWDVPEERIALWGHCQTLFIRYSFPALQAGLFFLRHAEVVEKDLPAREIYELLLLSLQWLSGLTTLSHPVYPLHLLREIETRVWLLAVEAESHVKNVGAFSPSSIGKDMVNGYSSNLIDRTASIITKMDSHISSATKNRIGEKHDARAAGQGNQRNQDTSTSIFGASTKPKRRAKGNVPQIRHFVDSSDRNTDFEDSSSLINIKSEFQLQEESTGLEISLSKWEESIEPAELERAVLSLLEFGQVTAAKQLQLKLAPGNLPSELIILDAVMKLAMLSTPCRQVLLSMLDDEVRSVIQSHSLKIDQPMIEPLQILENLSTILNEGSGRGLARKIIAVIKAANILGLTFTEAYQKQPIELLRLLSLKAQDSFEEACLLVQTHSMPAASIAQILAESFLKGLLAAHRGGYIDSQKEEGPAPLLWRFSDFLKWAELCPSEQEIGHALMRLVITGQEIPHACEVELLILSHHFYKSSTCLDGVDVLVALAATRVEAYVAEGDFSCLARLITGVGNFHALNFILNILIENGQLDLLLQKFSAAADANTGTAQAVRSFRMAVLTSLNLYNPNDHDAFAMVYKHFDMKHETATLLEARADQAAQQWFLRYDKDQNEDLLDSMRYYIEAAEVHTSIDAGNKARKACGQASLVSLQIRMPDSKWLCLSETNARRALVDQSRFQEALIVAEAYGLNQPSEWALVLWNLMLKPELAEDFVAEFVAVLPLQASMLLELARFYRAEMAARGDQSQFSVWLTGGGLPAEWAKYMWRSFRCLLKRTRDLRLRLQLATTATGFADMVDVCMNALDKVPENAGPLVLKKGHGGGYLPLM

SEQ ID NO: 4902 - protein, 633 aa, Arabidopsis thaliana
MSSSPFPVLDNRPIDKWKVTELKEELKRRRLTTRGLKEELVRRLDEALRAEQEESERINSATVAAAEKANQEPQMFPVTVGDRNQTTPVTPVEAAFSTETTPVTAEKTPEPTQTKITTEASAGVETTPAPVFSEPEVNAVPFASDEDEKEKVDDVRDIAGLDSSVVARDAAVVQVASSEHKSENNEPFSGLDGGDSKAQPSEAVLEKSAMYNQVSEVIPVTGFEVKSDCISTDSVSNNEKIELKDNKIADNVKLEQNVNKFQEPSTVVGESHPMDVEEPLEQKTSVGGGDDSNAANADMIKENNIIDAGDSEKLNLDRSSGDESMEDEPETKQSESITSDDKSAKIEMLSKEESRADMDAGKGKSPENKSHPLVASDKRKLPANDQEAVGNNEPAKRRRWNSNSIKVPEAQITNSATPTTTPRSTGLKRDFSRSDSSVSEDGPKERVVPPSPKEPTNSLRIDRFLRPFTLKAVQELLGKTGNVTSFWMDHIKTHCYVSYPSVEEAAATREAVYNLQWPPNGGRHLIAEFVRAEEVKEKLEAPLPPQPQHQPQAQTLSRPPPTALPPPPPLAKPPHVVERLPLPPPPPIAPEEQEPPIVTLDDLFKKTKAIPRIYYLPLSEEQVAAKLAANNNK

SEQ ID NO: 4903 - protein, 164 aa, Arabidopsis thaliana
MFFLLLSPRSDFTTIEFRVLSHSSLKIKMARTKQTARKSTGGKAPRKQLATKAARKSAPTTGGVKKPHRYRPGTVALREIRKYQKSTELLIRKLPFQRLVREIAQDFKTDLRFQSHAVLALQEAAEAYLVGLFEDTNLCAIHAKRVTIMPKDIQLARRIRGERA

SEQ ID NO: 4904 - protein, 136 aa, Arabidopsis thaliana
MARTKQTARKSTGGKAPRKQLATKAARKSAPTTGGVKKPHRYRPGTVALREIRKYQKSTELLIRKLPFQRLVREIAQDFKTDLRFQSHAVLALQEAAEAYLVGLFEDTNLCAIHAKRVTIMPKDIQLARRIRGERA

SEQ ID NO: 4905 - protein, 631 aa, Arabidopsis thaliana
MSVGVPVNPSSSSQLPAAPTTTTRRRVADSQEDHSHVNTVGGGNAVVYVPDEEETATSCCGGGGGGGSLSCCPSGSHHNYLVGFLSLRKFRLVWMLMVENKSKWTAGIARNMRSTTNLGRFILTLLSILVVTFFLIVALSGGVGRRRKHVEKHEFVVSIHPRPTIEKIIREDESSNSFQVLVPKTTSIPEIWNQPEVGNYQKCVARPKNQRPIKQTNGYLLVHANGGLNQMRTGICDMVAIAKIMNATLVLPFLDHSSFWSDPSSFKDIFDWKHFIKVLAEDVNIVEYLPQEFASIKPLEKNPVSWSKSSYYRNSISKLLKKHKVIVFNHTDSRLANNSPPPSIQRLRCRANYEALRYSEDIENLSNVLSSRLRENNEPYLALHLRYEKDMLAFTGCNHSLSNEESIDLEKMRFSIPHWKEKVINGTERRLEGNCPMTPREAAVFLKAMGFPSTTNIYIVAGKIYGQNSMTAFHEEFPNVFFHNTLATEEELSTIKPYQNRLAALDYNLALESDIFAYTYDGNMAKAVQGHRRFEGFRKTINPDRQRFVRLIDRLDAGLISWEDFSSKVKKMHQHRIGAPYLRQPGKAGMSPKLEENFYANPLPGCVCDTSEEQTGLNRFERPSLRAQSLR

SEQ ID NO: 4906 - protein, 162 aa, Arabidopsis thaliana
MSSEELRLVSPTIDNDGKLPRKYTMAGQGVKKDISPPLEWYNVPEGTKTLALVVEDIDAPDPSGPLVPWTVWVVVDIPPEMKGLPEGYSGNEDQTTGIREGNNDHKIPGWRGPLLPSHGHRFQFKLFALDDKPKIGHTVTKERLLIAIEGHVLGEAILTCLA

SEQ ID NO: 4907 - protein, 323 aa, Arabidopsis thaliana
MDRRNPFQHHHHHHQLHHHLIQQQQLPPPPLSTTATMDPGGGGGGGERIPQWSIEETKELLAIREELDQTFMETKRNKLLWEVVAAKMADKGFVRSAEQCKSKWKNLVTRYKACETTEPDAIRQQFPFYNEIQSIFEARMQRMLWSEATEPSTSSKRKHHQFSSDDEEEEVDEPNQDINEELLSLVETQKRETEVITTSTSTNPRKRAKKGKGVASGTKAETAGNTLKDILEEFMRQTVKMEKEWRDAWEMKEIEREKREKEWRRRMAELEEERAATERRWMEREEERRLREEARAQKRDSLIDALLNRLNRDHNDDHHNQGF

SEQ ID NO: 4908 - protein, 242 aa, Arabidopsis thaliana
MRKSFKDSLKALEADIQFANTLASEYPEEYDGGYVQMRLSYSPAAHLFLFLLQWTDCHFAGALGLLRILIYKAYVDGKTTMSLHERKTSIREFYDVLFPSLLQLHGGITDVEERKQKEICDKRYRKKDRTDKGKMSEIDLEREEECGICLEIRNKVVLPTCNHSMCINCYRNWRARSQSCPFCRGSLKRVNSGDLWIYTCSAEIADLPAIYKENLKRLLIYIDKLPLVTSDPNLVPYAPLPR

SEQ ID NO: 4909 - protein, 513 aa, Arabidopsis thaliana
METSMGKPSFLRNIMVRVLLFGVLIIVVRFAYVVTITGESCNRGDFCFFSLPENLNFVISGAASGSSAIDAIRSTSPGDDLYTTRDWIKSVQFYSSIFQDLIADGYLSPESKTLCVETAIGQEVHSLREIGVKNSVGISKKASRPLVVRGEGHAIPFEDNAFDFVFSGGDRLGKSLKQLEFADEITRTLKPEGFAVVHVGATDTYSFNSFLDLFNSCRLVKMRDIDGFDPSMPHIREFVIQKYSEIDGGGHHHRGGGDSGGKCWIPGYKRDLIRDAEPLIQEEPLKPWITLKRNIKNIKYVPSMVDIRFKSRYVYVDVGARSYGSSIGSWFKKEYPKQNKTFDVFAIEADKAFHEEYKIKKKVNLLPYAAWVRNETLSFEINHDPGKEVEAKAKGRGMGRIQPVKKSDSSDLAGEVNLIQGFDFADWLKKSVRERDFVVMKMDVEGTEFDLIPRLIKTGAICLIDELFLECHYNRWQRCCPGQRSQKYNKTYNQCLELFNSLRQRGVLVHQWW

SEQ ID NO: 4910 - protein, 421 aa, Arabidopsis thaliana
MEKKGSVLMLRYEVGKFLGQGTFAKVYHARHLKTGDSVAIKVIDKERILKVGMTEQIKREISAMRLLRHPNIVELHEVMATKSKIYFVMEHVKGGELFNKVSTGKLREDVARKYFQQLVRAVDFCHSRGVCHRDLKPENLLLDEHGNLKISDFGLSALSDSRRQDGLLHTTCGTPAYVAPEVISRNGYDGFKADVWSCGVILFVLLAGYLPFRDSNLMELYKKIGKAEVKFPNWLAPGAKRLLKRILDPNPNTRVSTEKIMKSSWFRKGLQEEVKESVEEETEVDAEAEGNASAEKEKKRCINLNAFEIISLSTGFDLSGLFEKGEEKEEMRFTSNREASEITEKLVEIGKDLKMKVRKKEHEWRVKMSAEATVVEAEVFEIAPSYHMVVLKKSGGDTAEYKRVMKESIRPALIDFVLAWH

SEQ ID NO: 4911 - protein, 674 aa, Arabidopsis thaliana
MAVTLDSPSPARKRRPLVVGSFESPKLSSDTKLTRSLFLASHEISSMQPLPFILRRNSLSLIRKVKILASVFDELLLPRSQLVVYSQSAHLCFEEMQIVMQRIKSLIDDCSRVSKLWLLLQIDIVAFNFHELVTDLSTVLDILPLHDFDLSDDAQDLISLLTKQCSDSVQFVDARDVALRRKVTDTIAGIKHQISPDHSTLIKIFNDLGLSDSASLTDEIQRLEDEIQDQIDDRSKSAAASLIGLVRYSKCVLYGPSTPAPDFRRHQSLSDANIPADFRCPITLELMRDPVVVATGQTYDRESIDLWIQSGHNTCPKTGQVLKHTSLVPNRALKNLIVLWCRDQKIPFELYGDGGGEPAPCKEAVEFTKMMVSFLIEKLSVADSNGVVFELRALAKSDTVARACIAEAGAIPKLVRYLATECPSLQINAVTTILNLSILEQNKTRIMETDGALNGVIEVLRSGATWEAKANAAATLFSLAGVSAYRRRLGRKARVVSGLVDLAKQGPTSSKRDALVAILNLVAERENVGRFVEAGVMGAAGDAFQELPEEAVAVVEAVVRRGGLMAVSAAFSLIRLLGEVMREGADTTRESAAATLVTMCRKGGSELVAEMAAIPGIERVIWEMIGAGTARGGRKAASLMRYLRRWAAGDTHNTAAETQSIVVPTPSRIFSPVL

SEQ ID NO: 4912 - protein, 152 aa, Arabidopsis thaliana
MKKMIGSPGTMSGLILRLGQCATAAASIGVMVSSYDFSNYTAFCFLVASMGLQLIWSFGLACLDVYAIRRKSDLRSPILLSLFTVGDWVTALLALAAACSSAGVTVLFTKDTEFCRQQPALSCDRFQISVGLSFFNWFLAAISSHTMFWILI

SEQ ID NO: 4913 - protein, 508 aa, Arabidopsis thaliana
MKGSILTVLSMENHHPSTLLSMDSSGSSHEELDLEMNNGNRQITLYNPPDINLPLSVGRSSPSWNLDSCDNILDVGLSSHVYETETFLNVVPSKVAKKCLKRGDSMWGAWFFFSFYFRPALNEKSKSKVIRESGGGGGGGGGCFTGFDKSDLKLDVFLVQHDMENMYMWAFKDKPENALGKMQLRSYMNGHSRQGERPFPFSAEKGFVRSHRMQRKHYRGLSNPQCLHGIEFVASPSLFGVGEEDKKRWMELTGRDLKFTIPPDASDFGSWRNLPNTDIELERPAHVTKAAPNNAKKILNGSGLHLTSNASFSSNGDSSDQSPGGGVINNKKRKEFLSPGSSEEECCLTVNNIETHHAKDPPSWVNDFTGVMKNSCGPVTAAKTVYEDEEAYLVVITLPFVDLNTVKVSWRNNITNGIVKVTGLSTSRASFVKRRDRTFKLVDQMAEHCPPGEFMREIQLPNRIPEEANIEAYFDGTGPVLEIVVPKLRGGVEEEHEVRVCLRSHHLG

SEQ ID NO: 4914 - protein, 76 aa, Arabidopsis thaliana
MSERPSRHQRRPSQSVFPISLDDLSDISLAANPPSTVPTNPPRHQIPPPSPAAPPANRSNNDDNVSKDHHGNASSN

SEQ ID NO: 4915 - protein, 226 aa, Arabidopsis thaliana
MVKRNQLRMKKNSAIYLDSRDVFTSCLMSTYYLLRGVFLQELAATCATAVKSTTYYLGSLPSKTALLKRCYTWKTMNESRGEKLSNGQQSITNAYGFSDDPGPFLRFLRETEWLNENDHRHCFSLGIKRGDGESNLNVDLRRKRLHEPDGVHEAQTLSLTYQDSSGQLHVPTETGEALLRKLETTISDIVSGCFCNVGQVFVDSCRSELRGPPPHPPANMNNSRCE

SEQ ID NO: 4916 - protein, 133 aa, Arabidopsis thaliana
MSLSLRILSDRTHKKGDGSFYVAWHWGKLDTDEDNQKTTKTESSPRVKVLECLVSDTLFPWNDLQAKLNGEFLNNLGNSVNRALSFIAKHMIMQAEKHPKANALYVEEIDIGGGEINYRLRKCRTVWFLFFVT

SEQ ID NO: 4917 - protein, 475 aa, Arabidopsis thaliana
MVDRTVRMGTEVKSIRVPRRVWFGSQISIVLLVGGNHTSSRHALFRALIIASALSVVPLLELTAKNHVFGDHGAVDLVDLGRFVIPGPKLFFHKLVQPFWGKIETEKYPQVVIADLVDELMGLKLLHYDAKILCIGQGSDSAVSGFKEMGFSVVQGVPKHPLFSFFSRKHVNELELSGDKSFDFVLCGDVDHVASPALLVLEMERVLKPGGTGAVLVSTNANRLVKSVTSGLKQSEIVRVNNLDKFTVIVFKRNVTETAYCIGKSQLPRDCKSVDTNRPYTEFMEPLLEQKPADFPKSVAYLPKFLDLSLKKSLVYIDIGAAEHMDANLTPNWFFPLYPLDSKAFNVYFVDHNTSVMLSYVKKPGVTFVYHPDLAENNSTGKKITPLEQLEPFPEDERFDFLAWFEETAKYADFVVLKMNTNQVEMKFLTVLLETGVICYVDELFLRCSNHKSDCINMLQTLRARGVFVHQWWED

SEQ ID NO: 4918 - protein, 306 aa, Arabidopsis thaliana
MQIFVKTLTGKTITLEVESSDTIDNVKAKIQDKEGIPPDQQRLIFAGKQLEDGRTLADYNIQKESTLHLVLRLRGGMQIFVKTLTGKTITLEVESSDTIDNVKAKIQDKEGIPPDQQRLIFAGKQLEDGRTLADYNIQKESTLHLVLRLRGGMQIFVKTLTGKTITLEVESSDTIDNVKAKIQDKEGIPPDQQRLIFAGKQLEDGRTLADYNIQKESTLHLVLRLRGGMQIFVKTLTGKTITLEVESSDTIDNVKAKIQDKEGIPPDQQRLIFAGKQLEDGRTLADYNIQKESTLHLVLRLRGGSF

SEQ ID NO: 4919 - protein, 1294 aa, Arabidopsis thaliana
MEAEIVNVRPQLGFIQRMVPALLPVLLVSVGYIDPGKWVANIEGGARFGYDLVAITLLFNFAAILCQYVAARISVVTGKHLAQICNEEYDKWTCMFLGIQAEFSAILLDLTMVVGVAHALNLLFGVELSTGVFLAAMDAFLFPVFASFLENGMANTVSIYSAGLVLLLYVSGVLLSQSEIPLSMNGVLTRLNGESAFALMGLLGASIVPHNFYIHSYFAGESTSSSDVDKSSLCQDHLFAIFGVFSGLSLVNYVLMNAAANVFHSTGLVVLTFHDALSLMEQVFMSPLIPVVFLMLLFFSSQITALAWAFGGEVVLHDFLKIEIPAWLHRATIRILAVAPALYCVWTSGADGIYQLLIFTQVLVAMMLPCSVIPLFRIASSRQIMGVHKIPQVGEFLALTTFLGFLGLNVVFVVEMVFGSSDWAGGLRWNTVMGTSIQYTTLLVSSCASLCLILWLAATPLKSASNRAEAQIWNMDAQNALSYPSVQEEEIERTETRRNEDESIVRLESRVKDQLDTTSVTSSVYDLPENILMTDQEIRSSPPEERELDVKYSTSQVSSLKEDSDVKEQSVLQSTVVNEVSDKDLIVETKMAKIEPMSPVEKIVSMENNSKFIEKDVEGVSWETEEATKAAPTSNFTVGSDGPPSFRSLSGEGGSGTGSLSRLQGLGRAARRHLSAILDEFWGHLYDFHGQLVAEARAKKLDQLFGTDQKSASSMKADSFGKDISSGYCMSPTAKGMDSQMTSSLYDSLKQQRTPGSIDSLYGLQRGSSPSPLVNRMQMLGAYGNTTNNNNAYELSERRYSSLRAPSSSEGWEHQQPATVHGYQMKSYVDNLAKERLEALQSRGEIPTSRSMALGTLSYTQQLALALKQKSQNGLTPGPAPGFENFAGSRSISRQSERSYYGVPSSGNTDTVGAAVANEKKYSSMPDISGLSMSARNMHLPNNKSGYWDPSSGGGGYGASYGRLSNESSLYSNLGSRVGVPSTYDDISQSRGGYRDAYSLPQSATTGTGSLWSRQPFEQFGVAERNGAVGEELRNRSNPINIDNNASSNVDAEAKLLQSFRHCILKLIKLEGSEWLFGQSDGVDEELIDRVAAREKFIYEAEAREINQVGHMGEPLISSVPNCGDGCVWRADLIVSFGVWCIHRVLDLSLMESRPELWGKYTYVLNRLQGVIDPAFSKLRTPMTPCFCLQIPASHQRASPTSANGMLPPAAKPAKGKCTTAVTLLDLIKDVEMAISCRKGRTGTAAGDVAFPKGKENLASVLKRYKRRLSNKPVGMNQDGPGSRKNVTAYGSLG

SEQ ID NO: 4920 - protein, 356 aa, Arabidopsis thaliana
MVSHEENTSIVEWFLGPHPYTYPPYGIEMIHEDDEVAVAHHHHHHQSGEYYREYEDHRSSDVDNDEIIARTLQDDFLQLEIAESNDYSHQNQQQQHQQEGYTNNYSNNNNGYAWNDQSPAVDYSSEWIGNDNDQDGRSDDSVNVFSCSSPSDTDEYVYSWESDQCDADGEFGRRLNQMVPIPYIPKINGEIPPEEEAVSDHERLRNRLEMFDFTEVKVPGDGNCQFRALADQLYKTADRHKHVRRQIVKQLKSRPDSYQGYVPMDFSDYLRKMSRSGEWGDHVTLQAAADAYRVKIVVLTSFKDTCYIEILPTSQESKGVIFLSFWAEVHYNAIYLNRDTSETELQRKRKWWRFGN

SEQ ID NO: 4921 - protein, 168 aa, Arabidopsis thaliana
MATATYPPPPPYYRLYKDFSENTDSAPEPPPPIEGTYVCFGGNYTTEDVLPSLEEQGVPQLYPKDSNLDYKKELRSLNRELQLHILELADVLVDRPSQYAKRIGEISSIFKNLHHLLNSLRPHQARATLIHIMELQIQQRKQAVEDIKRRREEAQGLLKDAFVTLDGQ

SEQ ID NO: 4922 - protein, 664 aa, Arabidopsis thaliana
MAVDSRMDLLSERAVLMRASLQKSQTITDNVVSILGSFDSRLSALETAMRPTQIRTHAIRKAHENIDRTLKAAEVILSQFDLLRQAETKVLKGPHEDLESYLDAIAQLRKIIRYFMSNKSFKSSDGVLNHANSLLAKAQSKLEEEFKQLLASYRILRMTFYLNYRSCHLTKIFFCEIKHFKAVEPDRLFDGLPNSLRPSSDGDGGGKPHGGHHNDDAETAAYTLPILIPSRVLPLLHDLAQQMVQAGHQQQLLQIYRDTRSFVLEESLKKLGVEKLSKEDVQRMQWEVLEAKIGNWIHFMRIAVKLLFAGERQVCDQIFRGFDSLSDQCFAEVTVSSVSMLLSFGDAIARSKRSPEKLFVLLDMYEIMRELHTEIETIFKGKACLEIRDSATGLTKRLAQTAQETFGDFEEAVEKDATKTAVLDGTVHPLTSYVINYVKFLFDYQTTLKQLFLEFGNGDDSNSQLASVTMRIMQALQNNLDGKSKQYKDPALTHLFLMNNIHYMVRSVRRSEAKDLLGDDWVQRHRRIVQQHANQYKRVAWTKILQSSSAQGLTSSGGGSLEGGNSSGVSRGLLKERFKMFNMQFDELHQRQSQWTVPDTELRESLRLAVAEVLLPAYRSFLKRFGPLVESGKNPQKYIKYTAEDLERLLGELFEGKSMNEPRR

SEQ ID NO: 4923 - protein, 518 aa, Arabidopsis thaliana
MGDEDVDGKCKNMSACSSTTSYSTKLFLFMVPLVVISGFVFVNIGPKDSTSLLTSLSTTTSHLPPPFLSTAPAPAPSPLLPEILPSLPASSLSTKVESIQGDYNRTIQLNMINVTATSNNVSSTASLEPKKRRVLSNLEKIEFKLQKARASIKAASMDDPVDDPDYVPLGPMYWNAKVFHRSYLEMEKQFKIYVYKEGEPPLFHDGPCKSIYSMEGSFIYEIETDTRFRTNNPDKAHVFYLPFSVVKMVRYVYERNSRDFSPIRNTVKDYINLVGDKYPYWNRSIGADHFILSCHDWGPEASFSHPHLGHNSIRALCNANTSERFKPRKDVSIPEINLRTGSLTGLVGGPSPSSRPILAFFAGGVHGPVRPVLLQHWENKDNDIRVHKYLPRGTSYSDMMRNSKFCICPSGYEVASPRIVEALYSGCVPVLINSGYVPPFSDVLNWRSFSVIVSVEDIPNLKTILTSISPRQYLRMYRRVLKVRRHFEVNSPAKRFDVFHMILHSIWVRRLNVKIREV

SEQ ID NO: 4924 - protein, 302 aa, Arabidopsis thaliana
MSNWRRQKPRNNNSNNYSRQRGTTMTQSSSKPPLANCKISVPAWEKDFCAVIGSVPWWKVVEAKRFMHIYDRVVQWDDSAGEDAFKNAKSRFWAEINGLTCDLSLPDPDVYIDDVDWDAEVDNELILDLERGPDPLTEEQEHVVILDALVLSGQYGGLGWGTGWGDAEGINEENVGKGKPENSWGDQKYDGWNEDSWGIKEKTETWDHNNNNTNTDSWDHNNNFKAETWDQKNCNNNSFNYKKVENWNGRDQGRENRGWRKRGEGRHGGERVEDCRWRNGRGRSRGGFQQHSANAWGWTESF

SEQ ID NO: 4925 - protein, 540 aa, Arabidopsis thaliana
MGFFTSVLGIIGFVIGIPIGLILGFFVLIYSQPSHQEYPPARPLVETSISVLLDLLPDIPLWMKNPDYERVDWFNKFISYMWPYLDKAVCGIIRSSVQPLFADYIGTFCIESIEFENLSLGTLPPTVHGVKFYETNEKELLFEPSIKWAGNPNIVLVLKVLSLRIRVQLVDLQFFAIVRVALKPLLPTFPCFGMVVVSLMEKPHVDFGLKVLGGDLMSIPGLYRYVQETIKRQVSSMYHWPQVLEIPILDSSTASVKKPVGLLHVSILRARNLLKKDLLGTSDPYVKLSLTGEKLPAKKTTIKKRNLNPEWNEHFKLIVKDPNSQVLQLEVFDWDKVGGHDRLGMQMIPLQKINPGERKEFNLDLIKNSNVVMDSGDKKKRGRLEVDLRYVPFREESIKRRKESREEKSSEDDDFLSQAGLLSVAVQSAKDVEGKKKHSNPYAVVLFRGEKKKTKMLKKTRDPRWNEEFQFTLEEPPVKESIRVEVMSKGTGFHFRSKEELGHVDINLDDVVDNGRINQKYHLINSRNGIIHIEIRWTTS

SEQ ID NO: 4926 - protein, 470 aa, Arabidopsis thaliana
MVLTEMSLDYSNRVLGSQKDNVKQMDKEETQQKENMLFSSQEYAAKLQKENMTLMKALAHRNKLVELSGIEIQKLRINLRSVQEKNLQLAQANSQMLAELNTNRDRLKDLQHELGCKNALLKVKKHLEEQVLPRTHHESKDKVSASASDGDCKSFQVHDIKHKDTKRKRTTRIKSSVSADVKPIPVNDSNSKANRKRRVSGVIDTTGIPEEICQTEDDIDKGVVSRGVNQDIDNVVNKKFVPDAANPVKESVHRKRQCTRRQSTRFDVQETKQTEKLLEMDGAKESKETASFSLRRRSARLRHEEAEPCKSLHEGDEVRETIKRRRVSLRLSARFDIQEPHVTETSNADDARSIVIEESAGSRSESVEPSESRHETKEITRKRSFSTRRQSTKGKSQTDEAIKEIATDPSLVNTIVQECDQETESKDKPKADENEGMTRRSSVGRPSRHAAEKVQSYREVSLRVKMRRKC

SEQ ID NO: 4927 - protein, 1050 aa, Arabidopsis thaliana
MVRNSLSLEIDDNGGAGRDGNHNANNVAGNGDTSFHSIRDRLRLKRNSSDRRDRSHSGLDRPSLRTRPHHIGRSLNRKGLLSLLKPRGTCLLYFLVAFTVCAFVMSSLLLQNSITWQGNVKGGQVRSQIGLGSTLKYVPGGIARTLIEGKGLDPLRSAVRIGVRPPRLALVLGNMKKDPRTLMLVTVMKNLQKLGYVFKVFAVENGEARSLWEQLAGHVKVLVSEQLGHADWTIFEGVIADSLEAKEAISSLMQEPFRSVPLIWIVHEDILANRLPVYQRMGQNSLISHWRSAFARADVVVFPQFTLPMLHSVLDDGNFVVIPESVVDVWAAESYSETHTKQNLREINEFGEDDVIILVLGSSFFYDEFSWDNAVAMHMLGPLLTRYGRRKDTSGSFKFVFLYGNSTKGQSDAVQEVASRLGLTEGTVRHFGLNEDVNRVLRMADILVYASSQEEQNFPPLIVRAMSFGIPIITPDFPIMKKYMADEVHGIFFRRNDPDALLKAFSPLISDGRLSKFAQTIASSGRLLTKNLMATECITGYARLLENMLHFPSDTFLPGSISQLQVAAWEWNFFRSELEQPKSFILDSAYAFIGKSGIVFQVEEKFMGVIESTNPVDNNTLFVSDELPSKLDWDVLEEIEGAEEYEKVESEELEDRMERDVEDWEEIYRNARKSEKLKFEVNERDEGELERTGEPLCIYEIYNGAGAWPFLHHGSLYRGLSLSSKDRRLSSDDVDAADRLPLLNDTYYRDILCEIGGMFSVANKVDSIHMRPWIGFQSWRAAGRKVSLSSKAEESLENIIKQETKGEIIYFWTRLDIDGDAYGSKNALTFWSMCDILNQGNCRTTFEDAFRHMYGLPEHIEALPPMPEDGHHWSSLHNWVMPTPSFLEFVMFSRMFSESLDALHNNLNDSKSCSLASSLLERKHCYCRVLELLVNVWAYHSGRKMVYINPRDGSLEEQHPLQQRKGLMWAKYFNFTLLKSMDEDLAEAADDKDHPRERWLWPLTGEVHWKGVYEREREERYRLKMDKKRKTKEKLYDRIKNGYKQKSLGG

SEQ ID NO: 4928 - protein, 440 aa, Arabidopsis thaliana
MASGSSSIAIGGLFENAEVTTSGRPVLRRNEVECFLLSSIDIDSEDDPPRFTALRSGNLILTTHRLIWIPSQSNESVPSSIPLSAVTHIYSHKKSIKSMFHSPRIRFQADPGSIVVTIVFRGKGDFDGFLSKLWECWRGRAWEEEEKSESETSKSGSGTVAQGLYGNDGTVRMVGLAGILRKEQEQWESTDKSLQDAFQDLNALMSKAKEMVSLAEKMRQKLLSAPSSQNGSTDDEEMGSKEEMQQWMLSVGIISPVTKESAGALYHQELSRQLADFVRIPLEKAGGMISLTDMYYHFNRARGTELISPDDLWQACTLWEKFDVPVMLRKFDSGVMVIQNKSHSDEEVMSRIRMLVTKTETLRVGVTASDAALTLKIAPAMAKEHLLSAETKGLLCRDMSPDGLRFYFNLFPEIDPTNLHIVKEFGTYGEWIKATSLLSV

SEQ ID NO: 4929 - protein, 670 aa, Arabidopsis thaliana
MERNGGHYTDKTRVLDIKPLRTLRPVFPSGNQAPPFVCAPPFGPFPPGFSSFYPFSSSQANQHTPDLNQAQYPPQHQQPQNPPPVYQQQPPQHASEPSLVTPLRSFRSPDVSNGNAELEGSTVKRRIPKKRPISRPENMNFESGINVADRENGNRELVLSVLMRFDALRRRFAQLEDAKEAVSGIIKRPDLKSGSTCMGRGVRTNTKKRPGIVPGVEIGDVFFFRFEMCLVGLHSPSMAGIDYLVVKGETEEEPIATSIVSSGYYDNDEGNPDVLIYTGQGGNADKDKQSSDQKLERGNLALEKSLRRDSAVRVIRGLKEASHNAKIYIYDGLYEIKESWVEKGKSGHNTFKYKLVRAPGQPPAFASWTAIQKWKTGVPSRQGLILPDMTSGVESIPVSLVNEVDTDNGPAYFTYSTTVKYSESFKLMQPSFGCDCANLCKPGNLDCHCIRKNGGDFPYTGNGILVSRKPMIYECSPSCPCSTCKNKVTQMGVKVRLEVFKTANRGWGLRSWDAIRAGSFICIYVGEAKDKSKVQQTMANDDYTFDTTNVYNPFKWNYEPGLADEDACEEMSEESEIPLPLIISAKNVGNVARFMNHSCSPNVFWQPVSYENNSQLFVHVAFFAISHIPPMTELTYDYGVSRPSGTQNGNPLYGKRKCFCGSAYCRGSFG

SEQ ID NO: 4930 - protein, 386 aa, Arabidopsis thaliana
MTKTRGTDMTKKKGKHVSEMDFKTHQHTEFFDKLIELTPARFYLPDETERKWYPGLSKAQKARAKKKTNDNLKKAKRDKLDPEKSALTTLDLLKEKIEKERLASQKQKLKKKHADLREQKLEQEKSGTELPDDDSKKETDNNRLNDDDSKEETDNNRQKDDRSVTYEELRERLHRKIDELKGGRGGSDRPRSNERRKKNLPNKRKRDTVSEEKTVEEIKSADKGKGKLDVEEAAKDLTFGYVKIDDDEEHGKEKKKRRLSKARELERAMKLEAAKKDPEKGDVIAKKHSWKAATSRAAGIKVHDDPKLLKQSIHKDKKRQEKNAEKWKERIEGQQKFKVEKQQKRSGNIADRIEQNKMRKIAKREKKLLRPGFEGRKEGFINEGGN

SEQ ID NO: 4931 - protein, 526 aa, Arabidopsis thaliana
MGSVDEVEISKTRVSCPPALSTSHKILISEEKPRRWSESSLPDVSNRIKLLKFGSPSARLKRMAEERDEVSRSVNSSSSSSHDVVSSRKIEWACLMKMGKQWLQNPLNMVMFLWIFVVAVSGAILFMVMTGMLNHALPKKSQRDVWFEVNNQILNALFTLMCLYQHPKRFYHLVLLCRWKQDDVTTLRKIFCKNGTYKPNEWIHMMVVVLLLHLNCFAQYALCGLNLGYRRSERPAIGVAICISFAIAAPTAAGLYTILSPLGKDYDPQGDEENQVQAVGEGPVSNRKLSLERRYSFASNDVSNPEWREGVLDIWEDISLAYLSLFCTFCLFGWNMERIGFGNMYVHIATFVLFCLAPFFIFNLAAINIDNEMVRDALGYTGIVLCLFGLLYGGFWRIQMRKRFKLPGYNICCGRPAIADCTLWLFCCWCSLAQEVRTANSYEIVEDKFCKRREENSKIDDEVVVSALPREDGVFDPSCLPKKMTTTMIASSTLSPSRQKDETCLGEKGDEALSPPSPPFIHREAS

SEQ ID NO: 4932 - protein, 274 aa, Arabidopsis thaliana
MWPLCFLLNKLLRVEERNQGILDGNGDSTFPKYCLFDDPLVSDGKYRDAGLPSSSHMDVPHVHQLASWDCGLACVLMVLRASGIASCTLEDLAEICSTNSIWTVDLAYLLQKFCVEFSYYTITFGANPNYSIEEFYKEQLPEDLVRVDLLFRKAHESGIIIQCRSVSIHEISCLLLSGNYIAIALVDQDKLSKSWLEEVLVSGLHSSNSCYTGHYVVICGYDAVRDEFEIRDPASSKIHERISSKCLENARKSFGTDEDLLLINLENMRNQNGY

SEQ ID NO: 4933 - protein, 520 aa, Arabidopsis thaliana
MSYTSTDSDHNESPAADDNGSDCRSRWDGHALKKGPWSSAEDDILIDYVNKHGEGNWNAVQKHTSLFRCGKSCRLRWANHLRPNLKKGAFSQEEEQLIVELHAKMGNRWARMAAHLPGRTDNEIKNYWNTRIKRRQRAGLPLYPPEMHVEALEWSQEYAKSRVMGEDRRHQDFLQLGSCESNVFFDTLNFTDMVPGTFDLADMTAYKNMGNCASSPRYENFMTPTIPSSKRLWESELLYPGCSSTIKQEFSSPEQFRNTSPQTISKTCSFSVPCDVEHPLYGNRHSPVMIPDSHTPTDGIVPYSKPLYGAVKLELPSFQYSETTFDQWKKSSSPPHSDLLDPFDTYIQSPPPPTGGEESDLYSNFDTGLLDMLLLEAKIRNNSTKNNLYRSCASTIPSADLGQVTVSQTKSEEFDNSLKSFLVHSEMSTQNADETPPRQREKKRKPLLDITRPDVLLASSWLDHGLGIVKETGSMSDALAVLLGDDIGNDYMNMSVGASSGVGSCSWSNMPPVCQMTELP

SEQ ID NO: 4934 - protein, 315 aa, Arabidopsis thaliana
MTCFSSATPHRHHLLLSSPSTSKSLLRFPSSYLKPSPSLLFHGSSRSLLSCSDGSNNRPPPSGDTVPNNFCIIEGSETVQDFVQMQLQEIQDNIRSRRNKIFLLMEEVRRLRVQQRIKSVKAINEDSELEATEMPEITSSIPFLPNVTPKTLKQLYSTSVALISGIIFFGGLIAPNLELKVGLGGTSYEDFIRSLHLPLQLSQVDPIVASFSGGAVGVISTLMLIEVNNVKQQEKKRCKYCLGTGYLPCARCSASGVCLSIDPITRPRATNQLMQVATTKRCLNCSGAGKVMCPTCLCTGMVTASEHDPRFDPFD

SEQ ID NO: 4935 - protein, 106 aa, Arabidopsis thaliana
MTRSWVLLFVLMFIVLTSQFEWNEQVENESETSSRPLILSDKEQQHIPQGKESVQVKKILFQEKKIQKLNELVRDLRRQLLQCRNENQVELTELETELDQLLVTGV

SEQ ID NO: 4936 - protein, 378 aa, Arabidopsis thaliana
MEPFVVKENIVASASSPMKKRRIDHTESADGSAINASNSSSIGGNDTVMNMAEFGNDNSNNQESQQVCTFFKKPTKSKNIRKRTIDADEEDGDSKSESSILQNLKKVAKPDSNLYFSSGPSTRTSGAPERPVFHYDSSKEIQVQNDSGATATLETETDFNQDARAIRERVLKKADHALKGNKKKASDEKLYKGIHGYTDHKAGFRREQTISSEKAGGSHGPLRASAHIRVSARFDYQPDICKDYKETGYCGYGDSCKFLHDRGDYKPGWQIEKEWEEAEKVRKRNKAMGVEDDDDEADKDSDEDENALPFACFICREPFLDPVVTKCKHYFCEHCALKHHTKNKKCFVCNQPTMGIFNAAHEIKKRMAEERSKAEQGL

SEQ ID NO: 4937 - protein, 393 aa, Arabidopsis thaliana
MFSWLARMALFCLRPMRRYGRMNRDDDDDDDHDGDSSSSGDSLLWSRELERHSFGDFSIAVVQANEVIEDHSQVETGNGAVFVGVYDGHGGPEASRYISDHLFSHLMRVSRERSCISEEALRAAFSATEEGFLTLVRRTCGLKPLIAAVGSCCLVGVIWKGTLLIANVGDSRAVLGSMGSNNNRSNKIVAEQLTSDHNAALEEVRQELRSLHPDDSHIVVLKHGVWRIKGIIQVSRSIGDAYLKRPEFSLDPSFPRFHLAEELQRPVLSAEPCVYTRVLQTSDKFVIFASDGLWEQMTNQQAVEIVNKHPRPGIARRLVRRAITIAAKKREMNYDDLKKVERGVRRFFHDDITVVVIFIDNELLMVEKATVPELSIKGFSHTVGPSKFSIFLS

SEQ ID NO: 4938 - protein, 460 aa, Arabidopsis thaliana
MQGHHQNHHQHLSSSSATSSHGNFMNKDGYDIGEIDPSLFLYLDGQGHHDPPSTAPSPLHHHHTTQNLAMRPPTSTLNIFPSQPMHIEPPPSSTHNTDNTRLVPAAQPSGSTRPASDPSMDLTNHSQFHQPPQGSKSIKKEGNRKGLASSDHDIPKSSDPKTLRRLAQNREAARKSRLRKKAYVQQLESCRIKLTQLEQEIQRARSQGVFFGGSLIGGDQQQGGLPIGPGNISSEAAVFDMEYARWLEEQQRLLNELRVATQEHLSENELRMFVDTCLAHYDHLINLKAMVAKTDVFHLISGAWKTPAERCFLWMGGFRPSEIIKVIVNQIEPLTEQQIVGICGLQQSTQEAEEALSQGLEALNQSLSDSIVSDSLPPASAPLPPHLSNFMSHMSLALNKLSALEGFVLQADNLRHQTIHRLNQLLTTRQEARCLLAVAEYFHRLQALSSLWLARPRQDG

SEQ ID NO: 4939 - protein, 286 aa, Arabidopsis thaliana
MQLKVPEHQVAGHIAKDGKPGPLVDDKGRFFKPLQGDSRGEIEVKFYESFSSNTEVPEHIHRYFPVYHGTQAVEGSDGAAMMVLENLLAEYTKPSVMDVKMGSRTWYPDASEEYIQKCLKKDTGTTTVSSGFRISGFEVYDHKESSFWKPERKLLRGLDVDGARLTLRKFVSSNSLSDTGSKPDSAFASSVYGGSHGILTQLLELKTWFENQTLYHFNSCSILMVYENESILKGNDDDARPQVKLVDFAHVLDGNGVIDHNFLGGLCSFINFIREILQSPDESADS

SEQ ID NO: 4940 - protein, 616 aa, Arabidopsis thaliana
MQQNSFFLGVNRDITDARTASGWSLCPVLDIDTTRYGVNVHVDDTFSFLYSDLYLRQVKEALRHTMLVHESVFESQICELHRLYRKQKELMMEMEETRHNKALYLNSGLPIPRTHWMSSSISAYQTRNLPHEEENISRLLVDNKVEKFEKKKVLDLELPVFEYSDMLEEVHEAQNFLEEQSLQRMSLDSGKQSSKLQLDLNEPAKIEEHSDYVFNQFLSSVISNEIGEESDTKNEGESLVKGSNGINEAQGSVKCREDYVIDLNMSPPSSEEELTIVKKFETEKPQESSSVSLHGKHGLDQPQGVVQELPCLTSTLLLDKRYKSLMTRSRSRNKVKHCPSNKTFKGSDHDPHSSGQASSESQSNQTSMEKGSSSSLSEAKSAKKGTSLGNKRHCKPQMKSSKGQKVVAKRSGRVKRKRSRRISLVAEGNYQQVSAAEAIVDISRKSGRETAACITSLSKNLLWFADISSSVAEDNKIDTLQLTEKKLEEHETNLRLNSSDNIAAVSSIVLKKQRRSRARQGKRKCQDDQHIVDTFSEWEANDDLQVIGKLMEASDLKWNCWFPKNKSKSSPPKPVDAFTSSGEEKTGVDWGALRKRRRGSRIPAADFKHMIINQVV

SEQ ID NO: 4941 - protein, 175 aa, Arabidopsis thaliana
MLQEQPVALSFRPNSFRRRSMETGVDRDDRGWTQLHIKAREGDLKAVKELLDQGADVNALACGPKSKGMTPLHLAAKGGHIEVMDLLLERGANMEARTSGACGWTPLHAAAKERKREAVKFLVGNGAFLPDDITDSRFNPPVQYCHGLEWAYEERKKLSEDTSLSCGDTSCSSAN

SEQ ID NO: 4942 - protein, 409 aa, Arabidopsis thaliana
MSSSSGSFSGSSSSACSSRSDCENSFDVEDLLQIGTTRRELRKQKDLLRESQPHSIELVRRLELHTKSLSESRLEDTARIQMMEKELLNCYKEIDYLRDQLIFRSKEVNYLNEHLHDLEFKLAESRNLEEEVNSLRDELCMSKSEHLLLLQELESKEIELQCSSLTLEKLEETISSLTLESLCEIESMKLDITALEQALFDAMKIQEESIQEKDQLKGIIEESQFQSQRAKENVKYIEKQNEDLREKFTASEKSIKDFFQSTKERLESEDEQPLNAMCFFAELSHVLPVSNEVRNCFDAIMKKLELSQNVNLIDKVEGMGKQIHQHEDVVKQLKEELKQEKLKAKEEAEDLTQEMAELRYKMTCLLDEERNRRVCIEQASLQRISELEAQIKRDVKKPASNEMLPLPGL

SEQ ID NO: 4943 - protein, 728 aa, Arabidopsis thaliana
MDDDGELGMFFPSWTSKNPIDTVESRGLMFSCFVAALVGILTIAYTAFQWRRNINLSWTKAIARSKKNPKARHKVPVAPHSWELDPIARAKNLNCCVCLKSMSPSQAIVASESFFHRCTICGAAAHFNCSSSAPKDCKCVSMVGFEHVVHQWAVRWTEGADQTDDSSFCSYCDESCSSSFLGGSPIWCCLWCQRLVHVDCHSNMSNETGDICDLGPLRRLILCPLYVKELTRNPSGGFLSSITHGANELASTALASIRIQSKKYKQTNETSADTGNSGSNCDESTESTADTGPTVNGAHAVLENSISVMNGDSSNGDSDSNGKLEKKPSVKRTGSFGQKEYHALRSKLKYELADLPSDARPLLVFINKKSGAQRGDSLRQRLHLHLNPVQVFELSSVQGPEVGLFLFRKVPHFRVLVCGGDGTAGWVLDAIEKQNFISPPAVAILPAGTGNDLSRVLNWGGGLGSVERQGGLSTVLQNIEHAAVTVLDRWKVSILNQQGKQLQPPKYMNNYIGVGCDAKVALEIHNLREENPERFYSQFMNKVLYAREGARSIMDRTFEDFPWQVRVEVDGVDIEVPEDAEGILVANIGSYMGGVDLWQNEDETYENFDPQSMHDKIVEVVSISGTWHLGKLQVGLSRARRLAQGSAVKIQLCAPLPVQIDGEPWNQQPCTLTISHHGQAFMLKRAAEEPLGHAAAIITDVLENAETNQVINASQKRTLLQEMALRLT

SEQ ID NO: 4944 - protein, 315 aa, Arabidopsis thaliana
MVGWAIALHGGAGDIPIDLPDERRIPRESALRHCLDLGISALKSGKPPLDVAELVVRELENHPDFNAGKGSVLTAQGTVEMEASIMDGKTKRCGAVSGLTTVVNPISLARLVMEKTPHIYLAFDAAEAFARAHGVETVDSSHFITPENIARLKQAKEFNRVQLDYTVPSPKVPDNCGDSQIGTVGCVAVDSAGNLASATSTGGYVNKMVGRIGDTPVIGAGTYANHLCAISATGKGEDIIRGTVARDVAALMEYKGLSLTEAAAYVVDQSVPRGSCGLVAVSANGEVTMPFNTTGMFRACASEDGYSEIAIWPNN

SEQ ID NO: 4945 - protein, 532 aa, Arabidopsis thaliana
MELPQPRPFKTQEFRTGRKPTHDFLSLCSHSTVHPDPKPTPPPSSQGSHLKTHDFLQPLECVGAKEDVSRINSTTTASEKPPPPAPPPPLQHVLPGGIGTYTISPIPYFHHHHQRIPKPELSPPMMFNANERNVLDENSNSNCSSYAAASSGFTLWDESASGKKGQTRKENSVGERVNMRADVAATVGQWPVAERRSQSLTNNHMSGFSSLSSSQGSVLKSQSFMDMIRSAKGSSQEDDLDDEEDFIMKKESSSTSQSHRVDLRVKADVRGSPNDQKLNTPRSKHSATEQRRRSKINDRFQMLRQLIPNSDQKRDKASFLLEVIEYIQFLQEKADKYVTSYQGWNHEPAKLLNWSNNNQQLVPEGVAFAPKLEEEKNNIPVSVLATAQGVVIDHPTTATTSPFPLSIQSNSFFSPVIAGNPVPQFHARVASSEAVEPSPSSRSQKEEEDEEVLEGNIRISSVYSQGLVKTLREALENSGVDLTKASISVEIELAKQSSSSSFKDHEVREPVSRTRNDNVKQTRKPKRLKTGQ

SEQ ID NO: 4946 - protein, 589 aa, Arabidopsis thaliana
MGVVEDTEPPLKRAKRLADEPNGFSANSSVRGSSVNSNSLGDLMARPLPSQGDDETIGSKGVIRKSEFVRIITRALYSLGYDKTGAMLEEESGISLHNSTIKLFLQQVKDGKWDQSVKTLHRIGFPDEKAVKAASFLLLEQKFLEFLKVEKIADALRTLRNEMAPLRINTKRVHELASSLISPSSFISHTTSTPGKESVNSRSKVLEELQTLLPASVIIPEKRLECLVENSLHIQRDSCVFHNTLDSDLSLYSDHQCGKHQIPSQTAQILESHTDEVWFLQFSHNGKYLASSSKDQTAIIWEISADGHISLKHTLVGHHKPVIAILWSPDDRQVLTCGAEEVIRRWDVDSGDCVHMYEKGGISPISCGWYPDGQGIIAGMTDRSICMWDLDGREKECWKGQRTQKVSDIAMTDDGKWLVSVCKDSVISLFDREATVERLIEEEDMITSFSLSNDNKYILVNLLNQEIRLWNIEGDPKIVSRYKGHKRSRFIIRSCFGGYKQAFIASGSEDSQVYIWHRSTGKLIVELPGHAGAVNCVSWSPTNLHMLASASDDGTIRIWGLDRINQQNQKKKLVQGSSSNGVIHRCNGN

SEQ ID NO: 4947 - protein, 1116 aa, Arabidopsis thaliana
MQMAQFLSLVRGDSIESPREITSPSNLISESGSNGWLIRFFDSSFFCEWIAVSYLYKHQHSGVRDYLCNRMYTLPLSGIESYLFQICYLMVHKPSPSLDKFVIDICAKSLKIALKVHWFLLAELEDSDDNEGISRIQEKCQIAATLVGEWSPLMRPHNEPSTPGSKVLNKFLSSKQKLFSLTLSPPTQKSLLFSPTSGSNLQDDGSQLSADDNKIFKRLIPSPKVRDALLFRKSADKEDEECEKDGFFKRLLRDSRGEDDEQRSNSEGFFKRLLKDNKSEEEEISNNSEGFFKRLRSSKGDEEELTSSSDGFFKRLLRDNKGDEEELGANSEGFFKKLLRDSKNEDEEPNANTEGFFKKLFHESKNEDDKVSNAVDDEEKDGFLKKLFKEKFDEKRNGNERNETDETVYTDETSGEDNGREGFFKKLFKEKFEDKPNIGKADDGNESEDDESSEFSLFRRLFRRHPEDVKTTLPSENCSNGGFVESSPGTENFFRKLFRDRDRSVEDSELFGSKKYKEKCPGSPKPQNNTPSKKPPLPNNTAAQFRKGSYHESLEFVHALCETSYDLVDIFPIEDRKTALRESIAEINSHLAQAETTGGICFPMGRGVYRVVNIPEDEYVLLNSREKVPYMICVEVLKAETPCGAKTTSTSLKLSKGGIPLANGDAFLHKPPPWAYPLSTAQEVYRNSADRMSLSTVEAIDQAMTHKSEVKLVNACLSVETHSNSNTKSVSSGVTGVLRTGLESDLEWVRLVLTADPGLRMESITDPKTPRRKEHRRVSSIVAYEEVRAAAAKGEAPPGLPLKGAGQDSSDAQPMANGGMLKAGDALSGEFWEGKRLRIRKDSIYGNLPGWDLRSIIVKSGDDCRQEHLAVQLISHFFDIFQEAGLPLWLRPYEVLVTSSYTALIETIPDTASIHSIKSRYPNITSLRDFFDAKFKENSPSFKLAQRNFVESMAGYSLVCYLLQIKDRHNGNLLMDEEGHIIHIDFGFMLSNSPGGVNFESAPFKLTRELLEVMDSDAEGLPSEFFDYFKVLCIQGFLTCRKHAERIILLVEMLQDSGFPCFKGGPRTIQNLRKRFHLSLTEEQCVSLVLSLISSSLDAWRTRQYDYYQRVLNGIR

SEQ ID NO: 4948 - protein, 326 aa, Arabidopsis thaliana
MPLDTKQQKWLPLGLNPQACVQDKATEYFRPGIPFPELGKVYAAEHQFRYLQPPFQALLSRYDQQSCGKQVSCLNGRSSNGAAPEGALKSSRKRFIVFDQSGEQTRLLQCGFPLRFPSSMDAERGNILGALHPEKGFSKDHAIQEKILQHEDHENGEEDSEMHEDTEEINALLYSDDDDNDDWESDDEVMSTGHSPFTVEQQACNITTEELDETESTVDGPLLKRQKLLDHSYRDSSPSLVGTTKVKGLSDENLPESNISSKQETGSGLSDEQSRKDKIHTALRILESVVPGAKGKEALLLLDEAIDYLKLLKQSLNSSKGLNNHW

SEQ ID NO: 4949 - protein, 213 aa, Arabidopsis thaliana
MAATALFRSIRRRDVVSAPLSVYKSLAGNAQPSWGSSYIGQNYASFSRAFGSKPVVNDILGTGLGTNNAIREEREKSKSTEAAIVGAQLTRSFRALDVGTSKRLFSTISGDIKTTQEEPKIKSFRPLSPHLSVYQPQMNSMLSIFNRISGVYLTGVTFAGYLLYLKMGMICLTYPSFYQVLYHTQQQLPVITSVTALAAIYHTIKSTHSLLTH

SEQ ID NO: 4950 - protein, 386 aa, Arabidopsis thaliana
MDVTGTVTVRDAFDRVSKKQKLYHSVTQDVIDLVCDGIQDTLTRIQLGNDDGVEPESVLTELRRKLDALLPIIQLQKSHKETKWSLSKLVKLLEVSYHPDISLACFSVDFDINLVNKILIHHCYREGLFDVGDCLVKEAGREEETEVRSQFLEFHQIVDSLKLRNIEPAMRWIFANRGKLKQKSSKLEFKLLSLKYCDILREGKSDDALEYARTHFTQYPLHFKEIQKLITCLLWIGNFEKSPYAEIVSPSCWDKVTKELIMEYHHLLDQPINSPLKVALSAGYESLPSLLKLVHLMALTKQEWQAMKQLPVPLELGNEYKFHSAFVCPVSRDQSSEENPPMQLPCGHVISKQSMMRLSKNCAFRTFKCPYCPAETLASACRQLYF

SEQ ID NO: 4951 - protein, 546 aa, Arabidopsis thaliana
MGDTALSLKCLGGSENQFCSDVSSFTDDGCRLVLGLGPTSTSYCFSVGVNNSNKDSASGFTQADSVLQLGRPAVSIDTFSGLDNGGVIPVVDEGSSSAKRSGGYMPSLLLDPNVKNPSQIQQLKDFGTGIHSQVSQEPSPYTEFYVQQRTSNPRKCKFMGCVKGARGASGLCISHGGGQRCQKPGCNKGAESKTTFCKTHGGGKRCEHLGCTKSAEGKTDFCISHGGGRRCEFLEGCDKAARGRSGLCIKHGGGKRCNIEDCTRSAEGQAGLCISHGGGKRCQYFSGCEKGAQGSTNYCKAHGGGKRCIFSGCSKGAEGSTPLCKAHGGGKRCLADGGGICSKSVHGGTNFCVAHGGGKRCVVVGCTKSARGRTDSCVKHGGGKRCKIIDCEKSAQGSTDFCKAHGGGKRCSWGDGKCEKFARGKSGLCAAHNTIMSRENKDGSKSGLIGPGLFSGLVFGSTSDHSQSGASAVSDCTDSVERIQFENRQKNKKMMIPMQVLVPSSMKSPSNSHEGETNIYDFMVPEERVHGGGLVMSLLGGSIDRN

SEQ ID NO: 4952 - protein, 211 aa, Arabidopsis thaliana
MDTSRDDDFTFSKVSPPDSEVKDLASDVGSITLKDGLDQQKSNGLIWKDKSLPPKEETIGSLSFTVTDSSSSKKQSNESSETFKTPARKPITRTKVPFEKGYSQMDWLKLTRTHPDLAGLKGESNKRLIPMDEVKKHRTGDSMWTVLKGRVYNISPYMNFHPGGVDMLMKAVGRDGTLLFNKYHAWVNVDILLEKCLVGVLDDTKVKKQEP

SEQ ID NO: 4953 - protein, 353 aa, Arabidopsis thaliana
MDLDDFRSVMDNAGVDVWTFIDTAILVASLDYGQELKRRRDNIVERLYATSMANKCRNCDFGGGGNVTEAAIGRVNNGRVHEETEEEDEEGVTAAAEEEVREKSVNVEDDDDFDPFAGLFDDEQKSIVEIKEKLEDPDLSEESLVELLQNLEDMDITFQALQETDIGRHVNRVRKHPSNNVRRLAKQLVKKWKETVDEWVKFNQPGDLEPPSLIADEDSPVQKALHNGSRQQVPDFGYSPVPQNGYSSSSKNSNITEPERKPRPVAPQPRRESPSPAKPSRPSPSQQTIPRDKEHKEVDFDTARKRLQQNYRQAENAKKQRTIQVMDIHDIPKPKKGGFFPRKGGSSQGGRHW

SEQ ID NO: 4954 - protein, 364 aa, Arabidopsis thaliana
MNTTSTHFVPPRRFEVYEPLNQIGMWEESFKNNGDMYTPGSIIIPTNEKPDSLSEDTSHGTEGTPHKFDQEASTSRHPDKIQRRLAQNREAARKSRLRKKAYVQQLETSRLKLIHLEQELDRARQQGFYVGNGVDTNALSFSDNMSSGIVAFEMEYGHWVEEQNRQICELRTVLHGQVSDIELRSLVENAMKHYFQLFRMKSAAAKIDVFYVMSGMWKTSAERFFLWIGGFRPSELLKVLLPHFDPLTDQQLLDVCNLRQSCQQAEDALSQGMEKLQHTLAESVAAGKLGEGSYIPQMTCAMERLEALVSFVNQADHLRHETLQQMHRILTTRQAARGLLALGEYFQRLRALSSSWAARQREPT

SEQ ID NO: 4955 - protein, 604 aa, Arabidopsis thaliana
MMAPMTNWLTFSLSPMEMLRSSDQSQFVSYDASSAASSSPYLLDNFYGWSNQKPQEFFKEEAQLAAAASMADSTILTTFVDPQSHHSQNHIPKLEDFLGDSSSIVRYSDNSQTDTQDSSLTQIYDPRHHHNQTGFYSDHHDFKTMAGFQSAFSTNSGSEVDDSASIGRTHLAGDYLGHVVESSGPELGFHGGSTGALSLGVNVNNNTNHRNDNDNHYRGNNNGERINNNNNNDNEKTDSEKEKAVVAVETSDCSNKKIADTFGQRTSIYRGVTRHRWTGRYEAHLWDNSCRREGQARKGRQVFYSFFGMCYLIWGCILALLKINSGYDKEDKAARAYDLAALKYWNATATTNFPITNYSKEVEEMKHMTKQEFIASLRRKSSGFSRGASIYRGVTRHHQQGRWQARIGRVAGNKDLYLGTFATEEEAAEAYDIAAIKFRGINAVTNFEMNRYDVEAIMKSALPIGGAAKRLKLSLEAAASSEQKPILGHHQLHHFQQQQQQQQLQLQSSPNHSSINFALCPNSAVQSQQIIPCGIPFEAAALYHHHQQQQQHQQQQQQQNFFQHFPANAASDSTGSNNNSNVQGTMGLMAPNPAEFFLWPNQSY

SEQ ID NO: 4956 - protein, 221 aa, Arabidopsis thaliana
MAIIFALVARGTVVLSEFSATSTNASSISKQILEKLPGNDSDSHMSYSQDRYIFHVKRTDGLTVLCMADETAGRNIPFAFLDDIHQRFVKTYGRAIHSAQAYSMNDEFSRVLSQQMEFYSNDPNADRMSRIKGEMSQVRNVMIENIDKVLDRGERLELLVDKTENMQGNTFRFRKQARRYRTIMWWRNVKLTIALILVLALVVYIAMAFVCHGPSLPSCFK

SEQ ID NO: 4957 - protein, 386 aa, Arabidopsis thaliana
MQNRIVQLEEGKENGITVRSGHYKGFPSKLLLLLGLFLTFSVTVFIISVSTIKYTGIQSVVTTVTSSFVPCREGEPNSLSKWIQPPAVLMHNMSDEELLWRASFWPRRKEYPFKRVPKVAFMFLTKGPLPLASLWERFLKGHKGLYSVYLHPHPSFTAKFPASSVFHRRQIPSQVAEWGRMSMCDAEKRLLANALLDVSNEWFVLVSESCIPLYNFTTIYSYLSRSKHSFMGAFDDPGPFGRGRYNGNMEPEVPLTKWRKGSQWFEVNRDLAATIVKDTLYYPKFKEFCRPACYVDEHYFPTMLTIEKPTVLANRSLTWVDWSRGGPHPATFGRSDITENFFGKIFDGRNCSYNGRNTSMCYLFARKFAPSALEPLLHIAPKILGF

SEQ ID NO: 4958 - protein, 305 aa, Arabidopsis thaliana
MEDDDSPSSRDLDAQNPYDRLLALDTSTVDPNCNLDSVSAIYLAMKSSKLECVDERGQDSLITSVCMEDEEDEELDEFDPYLFIKNLPNLSSVVPTFRPVLLPKQTRSCPPISLVLDLDETLVHSTLEPCGEVDFTFPVNFNEEEHMVYVRCRPHLKEFMERVSRLFEIIIFTASQSIYAEQLLNVLDPKRKLFRHRVYRDSCVFFDGNYLKDLSVLGRDLSRVIIVDNSPQAFGFQVENGVPIESWFNDPSDKELLHLLPFLESLIGVEDVRPMIAKKFNLREKIDAAVAAPEYPAEAGDPFER

SEQ ID NO: 4959 - protein, 650 aa, Arabidopsis thaliana
MDSGDATSLLLTKIRSLEPDYAPKIIGYLLLHDFGDRDLMHLARGPESILQSTISKVKSLLGIFSNNSPSSTPTSPSPLNPICRPPLNGRGSSHSNGFMDFRRNSPSSPSSTSPWSFNNCINGNNGNNPHISPKHTPISKPFSSHQSNGLSATHSGSADAAGGADLLDDQQLNDCLSFLDDSCSKTEDLVDPSIPLDYSVDGDGETHLHRRSFSCDASFVSGDDGFGGGCKPCVYFSRGLCKNGESCKFIHGGYPDNMDGNGIVADSPRKMENFVRQHEEMMRLKLAYQQQRLASQILGRAPQLPYEKRMDFLLQQHAQRDGGLPFGDERFWSSSPGRLERMELAMHLGDQSNSASRQIYLTFPADSTFKDEDVATYFSLFGTVQDVRIPYQQKRMFGFVSFAHPETVKVVLARGNPHFICDSRVLVKPYKEKGKVLDKKQQQLLQQQIERGNYSPCSSPSGIDPREQSDFHLGSKMLYERREMMRRKIEQADLLRAIELERRRFINLQLPEFKNSVTLNHHRSFSVGSPGYFSSAGNQSPDFQSELNGADALKVTDDTLELHPYPVVNPMSVNNSYSNGAKEETNKSELLDPDSGSTIELVLPSNLFPSASSTDDHKTDDSAETNAKVGVSSTNENDHEPPVTTNNLMQ

SEQ ID NO: 4960 - protein, 535 aa, Arabidopsis thaliana
MGNCCGNPSSATNQSKQGKPKNKNNPFYSNEYATTDRSGAGFKLSVLKDPTGHDISLQYDLGREVGRGEFGITYLCTDKETGEKYACKSISKKKLRTAVDIEDVRREVEIMKHMPKHPNVVSLKDSFEDDDAVHIVMELCEGGELFDRIVARGHYTERAAAAVMKTIVEVVQICHKQGVMHRDLKPENFLFANKKETSALKAIDFGLSVFFKPGEQFNEIVGSPYYMAPEVLRRNYGPEIDVWSAGVILYILLCGVPPFWAETEQGVAQAIIRSVIDFKRDPWPRVSDSAKDLVRKMLEPDPKKRLTAAQVLEHTWILNAKKAPNVSLGETVKARLKQFSVMNKLKKRALRVIAEHLSVEEAAGIKEAFEMMDVNKRGKINLEELKYGLQKAGQQIADTDLQILMEATDVDGDGTLNYSEFVAVSVHLKKMANDEHLHKAFNFFDQNQSGYIEIDELREALNDELDNTSSEEVIAAIMQDVDTDKDGRISYEEFVAMMKAGTDWRKASRQYSRERFNSLSLKLMRDGSLQLEGET

SEQ ID NO: 4961 - protein, 272 aa, Arabidopsis thaliana
MQSKPGRENEEEVNNHHAVQQPMMYAEPWWKNNSFGVVPQARPSGIPSNSSSLDCPNGSESNDVHSASEDGALNGENDGTWKDSQAATSSRSVDNHGMEGNDPALSIRNMHDQPLVQPPELVGHYIACVPNPYQDPYYGGLMGAYGHQQLGFRPYLGMPRERTALPLDMAQEPVYVNAKQYEGILRRRKARAKAELERKVIRDRKPYLHESRHKHAMRRARASGGRFAKKSEVEAGEDAGGRDRERGSATNSSGSEQVETDSNETLNSSGAP

SEQ ID NO: 4962 - protein, 401 aa, Arabidopsis thaliana
MKQRRRRNGCSSSNTISLLLLFFLVFFSRTSTSTSCRRRTVKHLSTTSTSSTPLESRITSKVIVISIVSGILTGLVSALVLAFLVRSIVKFMKQTPILKGPVVFSPKITPKSLHAALSNGIQLLGSDLNGKYYKMVLDNGLVVAVKRLGSLEGVGSPESSSSKSVKRRLQKELELLAGLRHRNLMSLRAYVRESDEFSLVYDYMPNGSLEDVMNKVRTKEVELGWEIRLRVAVGIVKGLQYLHFSCETQILHYNLKPTNVMLDSEFEPRLADCGLAKIMPSSHTAVSCYSAPESSQSNRYTDKSDIFSFGMILGVLLTGRDPTHPFCEESASGGSLGQWLKHLQQSGEAREALDKTILGEEVEEDEMLMALRITIICLSDFPADRPSSDELVHMLTQLHSF

SEQ ID NO: 4963 - protein, 537 aa, Arabidopsis thaliana
MMRKDISRKDIIEEIPYSGSSRMELKRSHHQWLTEESSSELFSNKRQQVVEIDAHMNLSPWDTSLVPSHFTDCLFDDPAIAHTSHLLRNGRNYTEEQCNPVSSFGLPLAHHGSSFNLDTINKVSNVPEFMVQLYGQGISTSFETAPSFNSGQESTTLSFGQTFSNTDRSFILPGQFASKTDGNFIRNFNNEGVGVVPIGDYYDKGDENVLSTFHPLEKGVENFLSMGQSLQKADCNIFSVSSSYNKGQENFMPLLSCEQVPEYDFMTESNYHNENANALSAGQSSFTEGGEMTFMVSSQERAGQSNDQIRREDDRSETLSFGDCQKETAMGSSVRVSNNYENFSHDPAITKDPLHIEAEENMSFECRNPPYASPRVDTLLVPKIKDTKTAKKGSTNTFPSNVKSLLSTGIFDGVTVKYYSWSREQRNLKGMIKGTGYLCGCGNCKLNKVLNAYEFEQHANCKTKHPNNHIYFENGKTIYGVVQELKNTPQEKLFDAIQNVTGSDINHKNFNTWKASYHVARLELQRIYGKDDVTLAS

SEQ ID NO: 4964 - protein, 481 aa, Arabidopsis thaliana
MASPQSTKTGLNLPAGMNQTSLRLETFSSSFRGISSLSSPSKSTCSDRFIPCRSSSRLHAFDLQDKEPTTPVKEGGNEAYSRLLKSELFGSDFASPLLSPAGGQGSASSPMSPCTNMLRFKTDRSNSSPSSPFSPSILGNDNGHSSDSSPPPKPPRKVPKTPHKVLDAPSLQDDFYLNVVDWSSQNVLAVGLGTCVYLWTASNSKVTKLCDLGPNDSVCSVQWTREGSYISIGTSHGQVQVWDGTQCKRVRTMGGHQTRTGVLAWNSRILSSGSRDRNILQHDIRVQSDFVSKLVGHKSEVCGLKWSHDDRELASGGNDNQLLVWNNHSQQPILKLTEHTAAVKAITWSPHQSSLLASGGGTADRCIRFWNTTNGNQLNSIDTGSQVCNLAWSKNVNEIVSTHGYSQNQIMLWKYPSMSKVATLTGHSMRVLYLATSPDGQTIVTGAGDETLRFWNVFPSVKMQTPVKDTGLWSLGRTQIR

SEQ ID NO: 4965 - protein, 446 aa, Arabidopsis thaliana
MPGVAVKLYSVFFKLLLKHRLQNLISISAADGLSDSFGVSTRSDESVAAANPSFTDGVATKDIHIDPMTSLTVRIFLPESALSPEPDSLRHKDNYNHQPRSDRRHSYGPNHNSPAPAERNESRRNSYGCNNENLEPYGGYAPSAKRNSRKLPVMLQFHGGGWVSGSSDSAANDFFCRRIAKVCDVIVLAVGYRLAPENRYPAAFEDGVKVLHWLGKQANLADCCKSLGNRRVNGVEVKKLNVQGQIVDAFGASMVEPWLAAHADPSRCVLLGVSCGGNIADYVARKAVEAGKLLEPVKVVAQVLMYPFFIGNNPTQSEIKLANSYFYDKPVSVLAWKLFLPEKEFDFDHPAANPLAHNRSGPPLKLMPPTLTVVAEHDWMRDRAIAYSEELRKVNVDSPVLEYKDAVHEFATLDMLLKTPQAQACAEDIAIWVKKYISLRGHEFSY

SEQ ID NO: 4966 - protein, 674 aa, Arabidopsis thaliana
MESGSEKKFPLNAKDYKLYEEIGDGVSATVHRALCIPLNVVVAIKVLDLEKCNNDLDGIRREVQTMSLINHPNVLQAHCSFTTGHQLWVVMPYMAGGSCLHIIKSSYPDGFEEPVIATLLRETLKALVYLHAHGHIHRDVKAGNILLDSNGAVKLADFGVSACMFDTGDRQRSRNTFVGTPCWMAPEVMQQLHGYDFKADVWSFGITALELAHGHAPFSKYPPMKVLLMTLQNAPPGLDYERDKRFSKAFKEMVGTCLVKDPKKRPTSEKLLKHPFFKHARPADYLVKTILNGLPPLGDRYRQIKSKEADLLMQNKSEYEAHLSQQEYIRGISAWNFNLEDLKTQAALISDDDTSHAEEPDFNQKQCERQDESALSPERASSSATAPSQDDELNDIHDLESSFASFPIKPLQALKGCFDISEDEDNATTPDWKDANVNSGQQLLTKASIGSLAETTKEEDTAAQNTSLPRHVISEQKKYLSGSIIPESTFSPKRITSDADREFQQRRYQTERSYSGSLYRTKRDSVDETSEVPHVEHKGRFKVTSADLSPKGSTNSTFTPFSGGTSSPSCLNATTASILPSIQSILQQNAMQREEILRLIKYLEQTSAKQPGSPETNVDDLLQTPPATSRERELQSQVMLLQQSFSSLTEELKKQKQKNGQLENQLNALTHRND

SEQ ID NO: 4967 - protein, 331 aa, Arabidopsis thaliana
MVPFWTTVSRNGSSDSETTLQSASKATKQYKYPSLRPSHRLSLLFLFPFHLSANGACFRCTCFSHFKLELRRMGNESYEDAIEALKKLLIEKDDLKDVAAAKVKKITAELQAASSSDSKSFDPVERIKEGFVTFKKEKYETNPALYGELAKGQSPKYMVFACSDSRVCPSHVLDFHPGDAFVVRNIANMVPPFDKVKYAGVGAAIEYAVLHLKVENIVVIGHSACGGIKGLMSFPLDGNNSTDFIEDWVKICLPAKSKVLAESESSAFEDQCGRCEREAVNVSLANLLTYPFVREGVVKGTLALKGGYYDFVNGSFELWELQFGISPVHSI

SEQ ID NO: 4968 - protein, 1367 aa, Arabidopsis thaliana
MKRIRDDIYATGSQFKRPLGSSRGESYEQSPITGGGSIGEGGINTQKLTTDDALTYLKEVKEMFQDQRDKYDMFLEVMKDFKAQKTDTSGVISRVKELFKGHNNLIFGFNTFLPKGFEITLDDVEAPSKKTVEFEEAISFVNKIKTRFQHNELVYKSFLEILNMYRKDNKDITEVYNEVSTLFEDHSDLLEEFTRFLPDSLAPHTEAQLLRSQAQRYDDRGSGPPLVRRMFMEKDRRRERTVASRGDRDHSVDRSDLNDDKSMVKMHRDQRKRVDKDNRERRSRDLEDGEAEQDNLQHFSEKRKSSRRMEGFEAYSGPASHSEKNNLKSMYNQAFLFCEKVKERLCSQDDYQAFLKCLNMFSNGIIQRKDLQNLVSDVLGKFPDLMDEFNQFFERCESIDGFQHLAGVMSKKSLGSEENLSRSVKGEEKDREHKRDVEAAKEKERSKDKYMGKSIQELDLSDCERCTPSYRLLPPDYPIPSVRHRQKSGAAVLNDHWVSVTSGSEDYSFKHMRRNQYEESLFRCEDDRFELDMLLESVGSAAKSAEELLNIIIDKKISFEGSFRIEDHFTALNLRCIERLYGDHGLDVTDLIRKNPAAALPVILTRLKQKQDEWTKCREGFNVVWADVYAKNHYKSLDHRSFYFKQQDSKNLSAKALVSEVKDLKEKSQKEDDVVLSISAGYRQPIIPHLEYDYLDRAIHEDLFKLVQFSCEEICSTKEQTGKVLKLWANFLELMLDVAPRAKGSDSVEDVVETQHQRAFTSGEANESSDAISLVSRQLKFATNGDVHASSGVSKHGETGLLNRDSSGKENLKDGDLANKDVATCAEKPQKDQEIGNGAAKRSGDVDERVATSSSSFPSGVENNNGKVGSRDSSGSRGILSKPSEAIDKVDSIQHTQGVDIGRIIVLGNGLQSDTSKANSNYDESGGPSKIEKEEGELSPVGDSEDNFVVYEDRELKATAKTEHSVEAEGENDEDADDEDGDDASEAGEDASGTESIGDECSQDDNGVEEEGEHDEIDGKAESEGEAEGMESHLIEDKGLFPSSERVLLSVKPLSKHIAAAALVDEKKKDSRVFYGNDDFYVLFRLHRVSAIDSYDLLSHILYERILSAKTYCSGSEMKLRNTKDTCSPDPYARFMNALFSLLNGSAENSKFEDECRAIIGNQSYVLFTLEKLIYKLVKQLQAVVADDMDNKLLQLYEYENSRRPGRVFDSVYYENARILLHEENIYRLECSSSPSRLSIQLMDNIIEKPDAYAVSMEPTFTSYLQNEFLSNSSGKKELQDIVLQRNMRGYNGLDDLAVACKAMEGVQVINGLECKMSCSSYKISYVLDTEDFFHRKKKQKKSNNLSLAKLSQNRIARFHKFLSASR

SEQ ID NO: 4969 - protein, 234 aa, Arabidopsis thaliana
MVYFQNSISLVDQSPIMAHSPDFHHHSKQSRTSSSNRKSSSSSCSSNFSVCCDGSRSAAIDVVILIAVITSSGFLIFPYIKFITIKSVEIFSELSCLVKEEILRNPDPIVYGLIALSISCTALSAWMIVILLCSRHRCGKPNCKGLRKANAEFDIQLETEDCVKSSNSGKSVSKKGLFELPRDHHRELEAELKKMAPPNGRAVLVFRAKCGCSVGRLEVPGPKKQQLQQRKVKK

SEQ ID NO: 4970 - protein, 53 aa, Arabidopsis thaliana
MTLPPGLYSGTSSLALVARASAFGLGLVYGNMKLKVLKIKSMSQKKVEATAHH

SEQ ID NO: 4971 - protein, 1038 aa, Arabidopsis thaliana
MATSKPQRSPAEIEDIILRKIFYVTLTESTDSDPRIVYLEMTAAEILSEGKELLLSRDLMERVLIDRLSGDFSDAEPPFPYLIGCHRRAYDESKKIQSMKDKNLRSEMEIVTKQAKKLAVSYCRIHLGNPDMFGNSDKPSGGLDNRLKKRNVSPVLPLIFAEVGSGSLDMFGASSSGVQAPPGFLDEFFKDSDFDSLDSILKELYEDLRSTVINVSVLGDFQPPLRALKYLVSLPVGAKSLVSHEWWVPRGAYMNGRAMELTSILGPFFHISALPDNTLFKSQPDVGQQCFSEASERRPADLLSSFSTIKNFMNILYSGLHDVLMILLKSTDTRERVLQFLAEVINANASRAHIQVDPVSCASSGMFVNLSAVMLRLCEPFLDPHLTKRDKIDPKYAFCGHRLKLSDLTALHASSEEVTEWIGKDAMANANDAGRENGNESRLLQSKEATSSSSNASGQNAKSATKYTFICECFFMTARVLNLGLLKALSDFKHLAQDISRGEDNLATLKAMRDQAPSPQLELDISRMEKELELSSQEKLCHEAQILRDGDFIQRALSFYRLMVVWLVGLVGGFKMPLPSTCPMEFSCMPEHFVEDAMELLIFASRIPKALDGVPLDDFMNFIIMFMASPEYVRNPYLRAKMVEVLNCWMPRSSSSSSATSTLFEGHQLSLEYLVRNLLKLYVDIEFTGSHTQFYDKFNIRHNIAELLEYLWQVPSHRNAWRRIAKDEEKGVYLNFLNFLVNDSIYLLDESLNKILEIKQIEADMSNTAEWEQRPTQERQERTRLFHSQENIVRIDMKLANEDVTMLAFTSEEITAPFLLPEMVERVANMLNYFLLQLVGPQRKSLSLKDPEKYEFRPKQLLKQIVRIYVNLARGDTVNIFPGAISSDGRSYNEQLFNAGADVLRRIGEEGRIIQEFMELGTKAKAAASEALDAEAALGEIPDEFLDPIQYTLMRDPVILPSSRITVDRPIIQRHLLSDNHDPFNRAHLTSDMLIPDIELKAKIDEFVKSHQSKKRTSGEDSSNKERIQTTNSDMLID

SEQ ID NO: 4972 - protein, 927 aa, Arabidopsis thaliana
MSAKLLYNLSDENPNLNKQIGCMNGIFQVFYRQHYPPRRVTGDELKSLPSGKASDNVGDTNISADKKETEKSKKKKTAKEKQRGVSSESSSRLSFSSSPCSSSFSSADISTTASQFEQPGLSNGENPVREPTNGSPRWGGLMMPSDIRELVRSSIHKETRTRDEEALSQQPKSARANVSLLKESSPSRNSNEWSEGRRVVKLKDSPRFSYDERETRKTGAKLKETPRLSLDSRSNSFRSARSSCSPEPQELVTGHRRTTSSVVAKLMGLEVIPDEPVTIQNRENRFCDSPRPTSRVEVDLQRSRGFDSIKKMMPAKFPMKASPWAQVDGAKNQVKIPDATTLTVYGEIQKRLSQLEFKKSEKDLRALKQILEAMEKTQQLISKDDDDNKTLCSSNFMQRNNQPIPSAINTSSMNFKSSSIVVMKAATAPVFKDTGIAGSASFSPRNVALPNVKVGNLRQAQKVIPRKQSAMDVTPRPGYYKGQTESTMKNTSTRPLQSKSDMAKSGKIQKPSVSLRTPPKKLGFEKQSRPTSPKPELNKNQRQQLSRQQTESASPRRKPGIKSRGLQQSEDRLSDESSDLRSLRSDSNVSLASNLDTEVTSRYNYERNSDITEQHTPKQRSPDLGMRSLSKPLKVTVEQPSPVSVLDVAFDEDDSPSPVRKISIVFKEDDNLSSEESHWMNKNNNLCRSIVWPESNTSLKQPDAELTEGFMEDDAEFKNGDHKYISEIMLASGLLRDIDYSMISIQLHQAHLPINPSLFFVLEQNKTSNVSLQDNKHKGRGFGQQQTVNLVERSKRKLIFDTINEILAHRFAAEGCTKQPSITLSISTQRTHEKSSRGEELLQTLCSEIDRLQDNSKCILDEDDEDLIWEDLQSHGMNWKEIEGETPGLVLDIERLIFKDLIGEVVTSEFAAFPRMLSGQPRQLFHC

SEQ ID NO: 4973 - protein, 232 aa, Arabidopsis thaliana
MGCVSSCFGVDDFEDYPNPSSSVNRSCPCPRCLVNNFLNLYISLFRRGETRSLPSSLQATNVSIATSTSYDNFMSNTFHSTPRPLPYDADPRYFRSRRDSLVSRRDKGSSHSHEEAEPLRSDADVDSESFSVEGSKWANKLIISGEDSKEEFSRSSRRILQSRTMSTSNEGLYITSDDEDVCPTCLEEYISENPKIVTKCSHHFHLSCIYEWMERSENCPVCGKVMEFHETP

SEQ ID NO: 4974 - protein, 362 aa, Arabidopsis thaliana
MAMSAIGFEGYEKRLEVTFFEPGLFLDTQGKGLRALAKSQIDEILQPAECTIVSSLSNDQLDSYVLSESSLFIFPYKIVIKTCGTTKLLLSIEPLLRLAGELSLDVKAVRYTRGSFLCPGGQPFPHRNFSEEVSVLDGHFAKLGLSSVAYLMGNDDETKKWHVYSASSANSNNKNNVYTLEMCMTGLDKDKASVFYKNESSSAGSMTDNSGIRKILPQSQICDFEFEPCGYSMNSIEGDAISTIHVTPEDGFSYASFEAVGYDFTTMDLSHLVSKVLTCFKPKQFSVAVHSTVAQKSYDSGLSVDLDDYGCKESTMESLGEERGTVMYQRFEKLGRYCGSPRSTLKCEWSSNSSCNSEDEKE

SEQ ID NO: 4975 - protein, 240 aa, Arabidopsis thaliana
MLCPTYTPSVYHFQTQKPVFRKQRFRVCSSTSGGEDDRFKVEYTPWLIVGLGNPGNKYHGTRHNVGFEMIDVLARKEGVLMNTIQSKALIGIGAIEDVPILLAKPQTYMNFSGESVGSLASHYRVPLRHILMIYDEMALPNGVLRLQPKGGQGYHNGVKSVMGHLDGRRNFPRLSIGIGKPPGNMDMKAFLLQKFSPLEQKQIEEALEQGSEAVKTLVLNGFNQGISRFNLVQKYKFHKV

SEQ ID NO: 4976 - protein, 1272 aa, Arabidopsis thaliana
MVEPVNSSLGKMLLEEISPVVMVLCTPLVEDTFLRNGLSFVETLKPFCNFSNIDVPVRTSSDQLYRLKKFTLRLFYASDIKQPNVEVAKQRLERVITQAGEKDFQDLKSDPPQITDILSNPESEIAPSWFRYYNKELIRTLSFSDHEAFDHPVACLLVVSSKDEEPIKKFVDLFNSNRLPTDGTMDPNILKHYLLVHDNQDATTERTSKVLSEMRSQFGNNECNLLCTNSSKEGNVEHQANPWASFKSSVSADKLGCALTGDDIVEIKDLMQEFASRHIIPYMEQKVRELNQQISATRKGLKNQFKNFLWRKGKDDNPDATKGSMYTYSSTESQIRILGDYAFMLHDYELALSSYRLIYTDYNIDKAWKHYAGVQEMRGLAYFISDQPKKDSECMENAFSTYMKLGKSGFQNATRCGLWWAEMLKARDQHKEAASVYFRICGEEPLHAAVMLEQASYCFMLTKPAMLHKYGFHLVLSGDHYKNCNQVNHAIRTYKSAISVYKSTTWSHIKDHLYFHIGQWYAIVGMHDVAVRNMLKVLDCGYQSKATQEIFLRDFFDIVKKTGMKHEVVGLQLPILNMSSLQVIYEDHRTYASQASALVEESIWQSLEDDIIPSLNSGKSNWLELQSKLLPKKYKESNVCVAGESVKLDLEFRNPLLISTSITSVSLICELTANSDDLKLVDNEPSGSSLSPEISTEHNQVTTSGFSSFTLSEVDFTLGGGEKKLVRLTVTPSEEGILKIVGVRWELSGSIVGVHYFQSVSVKAKTARGRRKNKLTPTDALKFLVIKSLPRLEGSIDHLPEKLYAGDLRYLVLELRNKSESPTKNLKMKISHPRFVSPGNHEEELTTEFPDCLKKGDEHNIVQRESNRTSSVFAFPKDVSLQGDRSLRWPLWLRAAIPGTISLYFTIYYEMENVSSMKYRTLRMHYNLQVLPSLQTSFKVTPSPSRLQEFLVRMDIVNRAKSDCFQIHQLSTVGCRWGISLLQPVDTILPSKFLLAGQALSCFFMIKDCRKSGTEDEETTSLPPSQTDVKLYTQDDDEKLFDIVSSPLASFHESERSCQGPSVQVSPNTVDFILISRLAKSSSPSAVPDLPKILSHHSCHNSIRSSSPISWSLDGPQTIHHDFSTSLCEIKLKMVIRNTSDGISSVTINTNDFLPDAAATTSSSGNQSGWRYVPTITEEMKLTSDVMGSRLGKPPSSMESSPPFIWSGLSSTKIQIQPLSTTEIPLQISVFSPGIYDLSSYELNWELSEHESATSSGTCQGYPYYLTVLQSE

SEQ ID NO: 4977 - protein, 348 aa, Arabidopsis thaliana
MSLAEINKNEVDIVIGALNADLTQFLTSWRPFFSGFHLIVVKDPELKEELNIPEGFDVDVYSKTDMEKVVGASNSTMFSGYSCRYFGYLVSKKKYIVSIDDDCVPAKDPKGFLVDAVTQHVINLENPATPLFFNTLYDPYCEGADFVRGYPFSLRSGVPCAASCGLWLNLADLDAPTQALKTEKRNTAYVDAVMTVPAKAMLPISGINIAFNRELVGPALVPALRLAGEGKVRWETLEDVWCGMCLKHISDHLGYGVKTGLPYVWRNERGDAVESLRKKWEGMKLMEKSVPFFDSLKLPETALKVEDCVIELAKAVKEQLGSDDPAFTQAADAMVKWVQLWNSVNSSA

SEQ ID NO: 4978 - protein, 673 aa, Arabidopsis thaliana
MYKMCHEPTNISSSESDFTFLEEDHLPLTSRRSLLLSSERVSQRIAAYVPASNVDSVLKREEEDCFNELGVVSNCDATESVSTEILESMNIGCSQGLKDSGNIRPQNNILGCCSNAVENFNRVGETERSDDLEHLTLKERRKMLLERVAIRLPESNVEDNTEDCDETELYKIKAEISCENGIASSSGVQFSGFLEKIDSVLCRNFSICSESGSQLGGIQESDIPISPERSFDLSPEASLPEVSSSNKNPRKRVKRVQRNPLPLNENEIQSTQVKVDPLADCVMEDNDEKNPVTSKQIPVKREVETHGEALDENELDSVKLSFRLNRCTSAPTPFRCMKNEAETASEMDEDIIDHMKLIDRLKLRSFHGSGHHEDLNSPSSGFSFCTSDEYVKPSRVFRPWKRKKTATDSIETALEEDAPGLLQVLIQQGVTVDELRLYGNEGGDVPSDDSLLNESFSELEDVISQLFYKRETGTKLLNSSFSKASRTSYCLTCLFSLIEQARYLQFRKWPVEWGWCRDLQSFIFVFERHNRIVMERPEYGYATYFFELSNTASIRWQVKRLVLAMKLASCGRYQLIENKPLLVGEDMTAGEAEVLIKYGWVANTGLGTMLNYRDRVYHDRKTQKPTSEWRSKISELLIDGYNSGTIVSTLIAPHDDDIDDAGLDMEDVKLEPY

SEQ ID NO: 4979 - protein, 309 aa, Arabidopsis thaliana
MFARRLSSLFSIVTKRSQSRLLSCPTTSAQNWVFAEFRQTIQATRFYASGRGKDYNLFGNVKPGDDDFRKTWEKEMEDDDTLWSGSEDESNDKTKQESGRNRLEKEIKKARQQAKDSTDQIDGDDSDELYSVWSGSDEEKTLWTGDEGDDDDDIPTEPRPNEASDKYLDKLFEFEEKPKYRTISELLKSENEPEELSPGKKARKLAVENALKKLNKGPDGRYTNVWEVMSDVDILIGAFENIISGPEYEELRKGGPKRLNMQFFKDIQTRMRDPNFKFTPEIKLKPKSKLVPRKKWQKAQSRIRKAKKR

SEQ ID NO: 4980 - protein, 708 aa, Arabidopsis thaliana
MFSFSKRRMRLGRVKKVQLSDSVQGYKSPLRVTKRADSSSNEAAVAATSYSDELDFQPSSGNSENWMVLSVNGEKPAPRFNHAAATIGNKMIVVGGESGSGLLDDVQVLNFDSCTWSTASSKVYLSPSSLPLMIPAWKGHCLVSWGKKVLLVGGKTDPSSDRVSVWAFDTDSECWSLMDAKGDLPVSRSGHTVVRASSVLILFGGEDSKKRKLNDLHMFDLKSSTWLPLNCTGTRPCARSHHVATLFDDKILFVFGGSGKNKTLNDLYSLDFETMVWSRIKIRGFHPSPRAGSCGVLCGTKWYITGGGSRKKRHAETLVFDILKVEWSVASISSQSSVTSNKGFSLVLLQHKDKDFLVAFGGTKKDPSNQVDAFTIDKNKSESPTHPQTTSKKNPGRLLFGKRSSSSAVLTSDESVKASSQRLIDSVARQKLASAIEEHGGSGRRSLSEIAFGDHRNPPSGNVSLRKQFSTEEEYRAVIEPAKCSEEDISVPPPTTDDNTGGAKITAEKTLSMVSDREILSLQKQCSETYPLENVDGALIFQEMDNINFAGSASSSSVYQFHEAKMTALIRRNGILEGQLEAALAGREAAERNVSVALRSKQETDKKLSDAMRDVELLKEKLTGLELAQEEANSLSNMVHSDNVRLEHDVAFLKAVLDDTQKELHSTRGVLAGERARAFQLQVEVFHLKQRLQSLENRAATPRKPFHV

SEQ ID NO: 4981 - protein, 116 aa, Arabidopsis thaliana
MAFSFLNKLLIIFIFIFISLSSSSPTISLVQQLSPEIAPLLPSPGDALPSDDGSGTIPSSPSPPDPDTNDGSYPDPLAFSPFASPPVSSPSPPPSLPSAGVLLISLIISSASFLAL

SEQ ID NO: 4982 - protein, 890 aa, Arabidopsis thaliana
MLTSPTLKSLWFLFTILGLLGQNLPCVLSSSHRILVDTDVDTDDLFAILYLLKLNKSEFDLVGITLSANAWTNAGHAVNQVYDLLHMMDRDDIPVGVGGEGGISDDGTIHSDVGGYFPIIEQGMTTTGECRYRQAIPKGLGGLLDIDSNYGFRKQFLPQGNRRYTPLQQPTAQKVIVDKISEGPTTVILLGSHTNFALFLMSNPHLKHNIQHIYIMGGGVRSQNPTGCCPANSTVAECQPRQCGNRGNLFTDYTSNPYSEFNIFADPFAAYQVFHSGVPVTLVPLDATNTIPINQKFFETFENNYQRTYEAQYVFLSLKIARDTWFDDEFYKSYFMWDSFTAGVAVSIMRNSANKNNKNGENDFAEMEYMNITVVTSNKPYGRSDGSNPFFDNRRTPKFNLALGGVHSGHVQTGLRDPTCLPKSGIGRGKCKDGYTQEISGSDSVRVLVATRAKPNINIKSKLDREFYVDFLEVLNRPEETGRFNFSSQFPYYKEELFRPDLSKTRPGKPVVFDMDMSAGDFLSLFYLLKVPVDKIDLKAIIVSPTGWANAATIDVVYDLLHMMGRDDIPVGLGDMLALNQSDPIFPPVGGCKYVKAIPRGCGGFLDSDTLYGLARDLPRSPRRYTAENSVTHGAPRDTDRPELRQPLAIEVWQNLTKSGNGVSKITVLTNGPLTNLAKIISSDKKSSSLIKEVYIVGGHINREKSDKGNIFTIPSNAYAEFNMFLDPLAAKTVLESALNITLVPLATQHKLSSFQTMLDRLYSSTKTPEARFVKRLLVRLQALHQKHRRYTHIDMFLGEVLGAVLLGGDDASLKPKMRAEHIKVIAEGDESRDGKILIDKLRGKQIKILERVDLISISESFASRLDDKKQSAVIGSFEEQKKIWSTPPS

SEQ ID NO: 4983 - protein, 1139 aa, Arabidopsis thaliana
MWSGFRDCTRNGRMTPSDLSRAGPVTRDIEQLKIELYSTFGVSKLDSSYILENKNALHAITALKKGAYLLKYGRRGKPKFCPFRLSNDESVLIWFSGKEEKHLKLSHVSRIISGQRTPIFQRYPRPEKEYQSFSLIYDERSLDLICKDKDEAEVWFSGLKALISRCHQRKWRTESRSDGTPSEANSPRTYTRRSSPLHSPFSSNESFQKEGSNHLRLHSPYESPPKNGVDKAFSDMSLYAVPPKGFFPPGSATMSVHSLSSGGSDTLHGHMKGMGMDAFRVSLSSAISSSSHGSGHDDGDTLGDVFMWGEGIGEGVLGGGNHRVGSSLEIKMDSLLPKALESTIVLDVQNIACGGQHAVLVTKQGESFSWGEESEGRLGHGVDSNVQHPKLIDALNTTNIELVACGEYHSCAVTLSGDLYTWGKGDFGILGHGNEVSHWVPKRVNFLMEGIHVSSIACGPYHTAVVTSAGQLFTFGDGTFGVLGHGDRKSVFIPREVDSLKGLRTVRAACGVWHTAAVVEVMVGSSSSSNCSSGKLFTWGDGDKSRLGHGDKEPKLVPTCVAALVEPNFCQVACGHSLTVALTTSGHVYTMGSPVYGQLGNPHADGKVPTRVDGKLHKSFVEEIACGAYHVAVLTSRTEVYTWGKGSNGRLGHGDADDRNSPTLVESLKDKQVKSIACGSNFTAAVCLHKWASGMDQSMCSGCRQPFNFKRKRHNCYNCGLVFCHSCSNKKSLKACMAPNPNKPYRVCDRCFNKLKKAMETDPSSHSSLSRRESVNQGSDAIDRDEKLDTRSDGQLARFSLLEPMRQVDSRSKKNKKYEFNSSRVSPIPSGGSHRGSLNITKSFNPTFGSSKKFFSASVPGSRIASRATSPISRRPSPPRSTTPTPTLSGLTTPKIVVDDTKRSNDNLSQEVVMLRSQVENLTRKAQLQEVELERTTKQLKEALAIASEESARCKAAKEVIKSLTAQLKDMAERLPVGSARTVKSPSLNSFGSSPDYAAPSSNTLNRPNSRETDSDSLTTVPMFSNGTSTPVFDSGSYRQQANHAAEAINRISTRSKESEPRNENEWVEQDEPGVYITLTALAGGARDLKRVRFSRKRFSEKQAEEWWAENRGRVYEQYNVRIVVDKSSVGVGSEDLGH

SEQ ID NO: 4984 - protein, 255 aa, Arabidopsis thaliana
MSSVTEIVSEQQVIDGIQDLALQNQDKKKIQEEIHEPSFGNHGGCCAICLSEIPLQETAMVKGCEHTYCVTCILRWASCKESPTCPQCKHPFDFLSVHRALDGSIEDFLFEESVCLLLRASWFVPLDVVEQASYSHGYHDDFDIPYDYEDEDDDLDEFYLHGSSLRIGNRRWGGNGFVRSGRQEARPVQRYSGSGSSSSSSSGSSSSEPKDKQVKTTNTTGRRAKRAMKREAANKAAEVTAAAKHEAHLVRLGRK

SEQ ID NO: 4985 - protein, 610 aa, Arabidopsis thaliana
MEVRSELRKQSRSGKRKWAILVGIVALTHILLLLSYGDALRYLLPDGRRLKLPNENNALLMTPSRNTLAVNVSEDSAVSGIHVLEKNGYVSGFGLRNESEDDEGFVGNVDFESFEDVKDSIIIKEVAGSSDNLFPSETTVMQKESVSTSNNGYQVQNVTVQSQKNVKSSILSGGSSIASPASGNSSLLVSKKVSKKKKMRCDLPPKSVTTIDEMNRILARHRRTSRAMRPRWSSRRDEEILTARKEIENAPVAKLERELYPPIFRNVSLFKRSYELMERILKVYVYKEGNRPIFHTPILKGLYASEGWFMKLMEGNKQYTVKDPRKAHLYYMPFSARMLEYTLYVRNSHNRTNLRQFLKEYTEHISSKYPFFNRTDGADHFLVACHDWAPYETRHHMEHCIKALCNADVTAGFKIGRDISLPETYVRAAKNPLRDLGGKPPSQRRTLAFYAGSMHGYLRQILLQHWKDKDPDMKIFGRMPFGVASKMNYIEQMKSSKYCICPKGYEVNSPRVVESIFYECVPVIISDNFVPPFFEVLDWSAFSVIVAEKDIPRLKDILLSIPEDKYVKMQMAVRKAQRHFLWHAKPEKYDLFHMVLHSIWYNRVFQAKRR

SEQ ID NO: 4986 - protein, 844 aa, Arabidopsis thaliana
MASQSCYNGIHRIKRVHPLIHSLTFHRFSSSSLPFKSHIPSSQQQLRIRSSSSLSDLGNRRHCSSTRGFQFWSYKRSEAASPFKTRYRENEEEEDMTIKPAVRISDGNLIIKNRTILTGVPDNVITTSASEAGPVEGVFVGAVFNKEESKHIVPIGTLRNSRFMSCFRFKLWWMAQRMGEMGRDIPYETQFLLVESNDGSHLESDGANGVECNQKVYTVFLPLIEGSFRSCLQGNVNDEVELCLESGDVDTKRSSFTHSLYIHAGTDPFQTITDAIRTVKLHLNSFRQRHEKKLPGIVDYFGWCTWDAFYQEVTQEGVEAGLKSLAAGGTPPKFVIIDDGWQSVERDATVEAGDEKKESPIFRLTGIKENEKFKKKDDPNVGIKNIVKIAKEKHGLKYVYVWHAITGYWGGVRPGEEYGSVMKYPNMSKGVVENDPTWKTDVMTLQGLGLVSPKKVYKFYNELHSYLADAGVDGVKVDVQCVLETLGGGLGGRVELTRQFHQALDSSVAKNFPDNGCIACMSHNTDALYCSKQAAVIRASDDFYPRDPVSHTIHIASVAYNSVFLGEFMQPDWDMFHSVHPAAEYHASARAISGGPLYVSDSPGKHNFELLRKLVLPDGSILRARLPGRPTRDCLFADPARDGVSLLKIWNMNKYTGVLGVYNCQGAAWSSTERKNIFHQTKTDSLTGSIRGRDVHSISEASTDPTTWNGDCAVYSQSRGELIVMPYNVSLPVSLKIREHEIFTVSPISHLVDGVSFAPIGLVNMYNSGGAIEGLRYEAEKMKVVMEVKGCGKFGSYSSVKPKRCVVESNEIAFEYDSSSGLVTFELDKMPIENKRFHLIQVEL

SEQ ID NO: 4987 - protein, 341 aa, Arabidopsis thaliana
MMEALHAMCLLAEEAKADVIREQETARKAIEEAPQVIKENSEDTEKFNSLTSEVEALKASLQSERQAAEDLRNAFSEAEARNSELATNLENVTRRVDQLCESASLQSEQQAAEDLRKALSLAEARNLELTTKLENVTRRVDQLCESESQEVLVKCISQNLGYDGGKPVAACVIYKCLLHWRSFEVERTNIFDRIVKIIASAIEVSDSYKVSDNNEVLAYWLSNSAMLVCVLQRTFRSSTMLSSKGLMSGVLVSYLDRQSQVVPKCPAMLFKKQLIDFLQKIYGMMRDNLKKEILPHLEYCKQAPWPFSNPKERIVHWQRIVGSLRSYLNIMKANNVSLRIR

SEQ ID NO: 4988 - protein, 551 aa, Arabidopsis thaliana
MNETFSATPRSMTIHRYRMKRGALRRRARDISVMLVVLVCATVVIWTWDRTPTSAFLPPESHYLKLQSEEKVEKLPTALNTETKDSYSSAIPFVNKEESKEDSSDNKDTEEEEEKQVEEVTVSNTNRGKIPTIEEKKGEHEVIASEPKYRKTPTREDFKLEKVKHEVAVGEGEATETTHIKETNSDPKSNILATDEERTDGTSTARITNQACNYAKGKWVVDNHRPLYSGSQCKQWLASMWACRLMQRTDFAFESLRWQPKDCSMEEFEGSKFLRRMKNKTLAFVGDSLGRQQFQSMMCMISGGKERLDVLDVGPEFGFITPEGGARPGGWAYRFPETNTTVLYHWSSTLCDIEPLNITDPATEHAMHLDRPPAFLRQYLQKIDVLVMNTGHHWNRGKLNGNKWVMHVNGVPNTNRKLAALGNAKNFTIHSTVSWVNSQLPLHPGLKAFYRSLSPRHFVGGEWNTGGSCNNTTPMSIGKEVLQEESSDYSAGRAVKGTGVKLLDITALSHIRDEGHISRFSISASRGVQDCLHWCLPGVPDTWNEILFAMI

SEQ ID NO: 4989 - protein, 688 aa, Arabidopsis thaliana
MSDDMVLHFSSNSSNQSDHSLPDKIAKLEARLTGKTPSSAKPPQQQQQQQQQVSLWSSASAAVKVVTSTPPGLSETSISDSDDENTGDFLIRANTKKRQKVQESNNFSVVDHVEPQEAAYDGRKNDAESKTGLDVSKKKQGRGRASSTGRGRGSKTNNDVTKSQFVVAPVSAASQLDASDQKDFRPDGQLRNGECSLQDEDLKSLRAKIAMLEEELRKSRQDSSEYHHLVRNLENEVKDLKDQEQQGKQKTTKVISDLLISVSKTERQEARTKVRNESLRLGSVGVLRTGTIIAETWEDGQMLKDLNAQLRQLLETKEAIERQRKLLKKRQNGDKNDGTDTESGAQEEDIIPDEVYKSRLTSIKREEEAVLRERERYTLEKGLLMREMKRIRDEDGSRFNHFPVLNSRYALLNLLGKGGFSEVYKAYDLVDHRYVACKLHGLNAQWSEEKKQSYIRHANRECEIHKSLVHHHIVRLWDKFHIDMHTFCTVLEYCSGKDLDAVLKATSNLPEKEARIIIVQIVQGLVYLNKKSQKIIHYDLKPGNVLFDEFGVAKVTDFGLSKIVEDNVGSQGMELTSQGAGTYWYLPPECFELNKTPMISSKVDVWSVGVLFYQMLFGKRPFGHDQSQERILREDTIIKAKKVEFPVTRPAISNEAKDLIRRCLTYNQEDRPDVLTMAQDPYLAYSKK

SEQ ID NO: 4990 - protein, 112 aa, Arabidopsis thaliana
METGSSSPMMGRFTTSRKLLAISLSVLAVLSPLYIDRLSEEDLEEEEELFSFMFSFSLLLLLLILAIALSLYSDPSLTRFDPYWIHRLCGSFGGLLVILILLVFVLICKASG

SEQ ID NO: 4991 - protein, 470 aa, Arabidopsis thaliana
MSRESENTDDEPSKWMKFRSLLVFSMLLRVFLIVYGEWQDAHMEVRYTDVDYIVFSDAASLMASGESPYKRTTYRYSPLLALLLTPNSFFHRSWGKFLFSASASQCVDDLFLCRFGIYFHVSDLLVGWFIHKILKQRKVPEKICTYSVMVWLFNPFTFTIGTRGNCEPIVCAMILWIILCLMQGNLLQAAFWYGLVVHFRVYPIIYALPIILVLDTQVFRSGQKPALLYWNTGQAKTPASNMERKTFLFNLLTTLKSLFSRERIMFALISGGVFLACNAVSFYFYGQEFLHEALLYHLTRTDPRHNFSIYFYHIYLHYERQFSAVEKLISFLPQFTVQFALVFCFSQDLVFCIFLQTVAFVTFNKVITAQYFVWFYCLLPLILPWSHMKLKWEGLLCIIMWIGAQTHWLLWGYMLEFKGVNVFLPLWIASLLFLAANTFVLVRIIQRHRFSPLFRRYESSSSSNNVTKED

SEQ ID NO: 4992 - protein, 469 aa, Arabidopsis thaliana
MSLDIKKPNITKTKKKKTGFVVKMQLNNNRGGNKRNIFIFFFFRNYYTWILWFCLSLYFFTSYFSVEDQSSPSSIRLLSNHKTSSSLPSRALIESSAIKTTSIGLFTGMKIYVYDLPASYNDDWVTASDRCASHLFAAEVAIHRALLSSDVRTLDPDEADYFFVPVYVSCNFSTSNGFPSLSHARSLLSSAVDFLSDHYPFWNRSQGSDHVFVASHDFGACFHAMEDMAIEEGIPKFMKRSIILQTFGVKYKHPCQEVEHVVIPPYIPPESVQKAIEKAPVNGRRDIWAFFRGKMEVNPKNISGRFYSKGVRTAILKKFGGRRRFYLNRHRFAGYRSEIVRSVFCLCPLGWAPWSPRLVESAVLGCVPVVIADGIQLPFSETVQWPEISLTVAEKDVRNLRKVLEHVAATNLSAIQRNLHEPVFKRALLYNVPMKEGDATWHILESLWRKLDDRSYRRSRVLSQREVDM

SEQ ID NO: 4993 - protein, 778 aa, Arabidopsis thaliana
MQKSGVNRNPSLKVAIPQAQQSLRRLGFCSQIATGGSQQSSPIVFPEKRNKKVKASSRRGEVTNDPQVKPKPDEHRIDIGGGDEKSDLLGSLVYAGKLVLDKRKSASGKDATEIQQPAATDISIKKAVDAKLTSSALVWGSDMLQLNDVVSVTYNVGLRHFTVHAYPIGKGSCGLSCFTKPKRSRKDFRFVAPTVEEAVQWVASFGDQQCFINCLPHPLVAKKQASSELFSVPIDTPPELVFRCKSAPKMLVILNPRSGHGRSIKVFHNVVEPIFKLAGIKMEVVKTTKAGHARELASTVDINLCSDGIICVGGDGIINENSLGRLRWIQKTAFDVLNGLLTRSNPKEGVSIPIGIVPAGSDNSLVWTVLGVRDPISAALSIVKGGLTATDVFAVEWIHTGIIHFGMTVSYYGFVSDVLELSEKYQKRFGPLRYFVAGFLKFMCLPKYSYEVEYLPAQKEDAEGKIRLEKEAVDMQDLYTDVMRRSSREGFPRASSLSSIDSIMTPSVGELDTCSSTHASTEPSEYVRGIDPKMKRLSSGRRDVTAEPEVIHPQAQSTTPNWPRTRSKSRMDKGWMGLTSVQDPPTRCSWGNTGGQDREDISSTVSDPGPIWDAGPKWDTEPSAWDVENSIELPGPPEDIETGLRKQSITPIFEDKWVSRKGHFLGIMVCNHACRTVQSSQVVAPNSEHDDGTMDMLLVHGCGRLRLLRFFILLQTGRHLSLPYVECVKVKSVKIKAGKNTHDSCGIDGELFALHGEVISTMLPEQCRLIGNAPGRHS

SEQ ID NO: 4994 - protein, 500 aa, Arabidopsis thaliana
MSPPLREKTLAAIYNLKRRKRSDKKICRKEPNDSAMAAGPVVIKRETEDTPGEEEEGNTSRDNALVEVKLEKQEELGLLVTCGIQKRKRLARGARSRRYSDTSFEEKPIIIPPKHKQQRVLTTRWNNERIKFAEQTLADIMKEKGATFEKPVTRQLLRVIARSKIGDTGLLDHSLKHMDGKVTPGGSDRFRRCYNTDGCMQYWLESADLVKIKLESGIPDPTWVPPAWWMVQTASSHDQSAVTSKLLMGEIEQMKSEIKELVSKQNLPDHADANEKLFKELKSWRENTDKQIVEISESLTSTQGMFKELNSWKDKVDQQLLGISNTLSNLQPNGSTSFSPAQENWEHILKTSNLEDFTTNGFDQWDDLIDGLPEAVRPETYALPTNPCKSSLQDQSLISLQDQSLVSLQDQSLVNVDMQMTESSMTRGESRSSSQEKAEMTPGSSITAGPKSDIDDPTIQTQETLKELVTWKAKAEQQLMELSNAVLALKGQNQPNWRYP

SEQ ID NO: 4995 - protein, 63 aa, Arabidopsis thaliana
MSGSRLFFGVSTIVSIIFAILLPMAHAQSAAPAPAPTSDGTTIDQGIAYVLMLVALVLTYLIH

SEQ ID NO: 4996 - protein, 887 aa, Arabidopsis thaliana
MTNLSPIKSLNPIGFDLIRKCQHLFDLVSKLTPLYKSEFLTNYNDRDIYRESGYVLVSTVDGSISLVDMSSQKLDWTFHTNEPIYSSYQAPHYHYTTDEERSSVLGDDFYMDCDKDWRLYNSSVRKGKRVNEIVDASEFIGTLPYTSTDRIVLGKKDTSVFLLDWKTGKLVKRYRMDELYSNTVVENDKEKAIVLSKEAPLLFGSGFKKSEDFPELVYIERKDFKIQCISKFGDVLWSVSYAKMEAKLQNHESVQFISGLSSSVGKNQFPLSYTTSVPMVQLRNVKYETLFPRLGFLDEALYLPFQDRKPNQLAIGDGNQLTLPGNKEAEEVLSLPLPETVISQITDIIDGSTKQAGFASKFSGLIVLIFGFCVTMLSVCGLFFYRLRQSIRIKEPYVSEVPIATPKKKKSKKNGTTKAVHKKENGFISGGNKDPSHEENEKRLLTAFPGLNNSSAEGYRVGKLFVSNKEIAKGSNGTVVLEGSYEGRLVAVKRLVQSHHDVAQKEILNLMASDKHSNIVRWYGVDQDEHFIYISLELCACSLNDLIYASSALLESPMASSSIHSIQINPIFENGKGVELWKENGHPSPVLLKLMRDIVAGLVHLHDIGIVHRDLKPQNVLIVKNSSLCAKLSDMGISKRLPADTSALTRNSTGLGSGSSGWQAPEQLRNERQTRAVDLFSLGCVLFFCMTGGKHPYGDNYERDVNVLNDQKDLFLIESLPEAVHLLTGLLNPDPNLRPRAQDVMHHPLFWNSDMRLSFLRDASDRVELENREEGSQLLAALESTAAVTLNGRWDEKLDSIFLDNIGRYRRYKFDSIRDLLRVIRNKLNHYRELPKELQELLGSVPEGFERYFSSRFPKLLIQVYTVLFDYCNNEEFFFKYSKTTVF

SEQ ID NO: 4997 - protein, 381 aa, Arabidopsis thaliana
MSASSSSFEQPQVITCNAAVAWRAGEPLVMEEVEVSPPQPLEIRIKVVCTSLCRSDLSAWESQSLLPRIFGHEAAGIVESIGEGVTEFEKGDHVLAVFTGECGSCRHCISGKSNMCQVLGMERKGLMHSDQKTRFSIKGKPVYHYCAVSSFSEYTVVHSGCAVKVDPLAPLHKICLLSCGVAAGLGAAWNVADVQKGSSVVIFGLGTVGLSVAQGAKLRGAAQILGVDINPAKAEQAKTFGVTDFINSNDLSEPIPQVIKRMTGGGADFSFECVGDTGIATTALQSCSDGWGMTVTLGVPKAKPEVSAHYGLFLSGKSLKGTLFGGWKPKSDLPSLIDKYMNKEIMIDEFITHNLSFDEINKAFVLMREGKCLRCVLHMPK

SEQ ID NO: 4998 - protein, 761 aa, Arabidopsis thaliana
MPLLRSAITVVFRCSGENCDYHENIQFLRLGNFGNLDVSFVMLKTLCFVIPWLLKLSFIVAFRDDNTICLSPSLKNNELSRQTNSWVSPFCLQRRAYSTGFTSVHGGIPTAEYAKLRRESLETEFGHALGAYSSKSFSAVYRFGPFLALYRAAIISYHVVKLAFWQLFVQDMRKRAVKFRETLISLGPFYIKLGQALSTRPDILPSIYCQELSKLQDQIPPFPTTVAMRCIEEQLGAPVSKLFADISLKPVAAASLGQVYKAHLHSGQLVAVKVQRPGMSLILTRDALLFKMIGGQLKRFAKARKDLLVAVNEMVRHMFDEIDYVLEAKNAERFASLYSFDSGNEQIDDNAGPRNMSRNHRAENIKVPKIYWNFTRTAVLTMEWIDGIKLTDEIKLKRASLDRRDLIDQGLSCSLKQLLEVGFFHADPHPGNLVATKEGSLVYFDFGMMGNIPRHYRVGLIQILVHFVNRDSLSLANDFLSLGFLPEGVDIQAVSNALRTSFGSTTRISQDFQGVMEQLYDVMYEFNFSLPPDYALVIRSLGSLEGTAKILDPEFKVIESAYPFVIGRLLADPSPDMRKILRELVICNDGSIRWNRLERLVAAISEQASATSGDSPEDKTLKKSSELKSFDMHSVVSATEDLLLFILSEKGQRVRVFLLQDIIRVVDIFLEVEALELNKTINLKTEEGTMKRVSNGFKGLSEAVKLAPGMWISMLLRMSRKSEVHSYALDIVSALSTHFGHKVPHTCWILLSKLLHHNKSQ

SEQ ID NO: 4999 - protein, 488 aa, Arabidopsis thaliana
MGSKLKLYPLLNHSSVFHPDSRYQSAPTMEEEQQQLRVLFAKYEMGRLLGKGTFGKVYYGKEITTGESVAIKIINKDQVKREGMMEQIKREISIMRLVRHPNIVELKEVMATKTKIFFIMEYVKGGELFSKIVKGKLKEDSARKYFQQLISAVDFCHSRGVSHRDLKPENLLVDENGDLKVSDFGLSALPEQILQDGLLHTQCGTPAYVAPEVLRKKGYDGAKGDIWSCGIILYVLLAGFLPFQDENLMKMYRKIFKSEFEYPPWFSPESKRLISKLLVVDPNKRISIPAIMRTPWFRKNINSPIEFKIDELEIQNVEDETPTTTATTATTTTTPVSPKFFNAFEFISSMSSGFDLSSLFESKRKLRSMFTSRWSASEIMGKLEGIGKEMNMKVKRTKDFKVKLFGKTEGRKGQIAVTAEVFEVAPEVAVVELCKSAGDTLEYNRLYEEHVRPALEEIVWSWHGDNHNNNIVKSNGNYVSDENSGSDC

SEQ ID NO: 5000 - protein, 308 aa, Arabidopsis thaliana
MGDVYFNHFAQQLQMSDQEKGEMSRHSHPHSINEESESSTLERVAAESLTNKVLDRGLMEYGCPHYRRRCCIRAPCCNEIFGCHHCHYEAKNNINVDQKQRHDIPRHQVEQVICLLCGTEQEVGQICIHCGVCMGKYFCKVCKLYDDDTSKKQYHCDGCGICRIGGRENFFHCYKCGCCYSILLKNGHPCVEGAMHHDCPICFEFLFESRNDVTVLPCGHTIHQKCLEEMRDHYQYACPLCSKSVCDMSKVWEKFDMEIAATPMPEPYQNRMVQILCNDCGKKAEVQYHVVAQKCPNCKSYNTRQTRG

SEQ ID NO: 5001 - protein, 434 aa, Arabidopsis thaliana
MDFCWKREMEGKLAHDHRGMTSPRRICVVTGPVIVGAGPSGLATAACLKERGITSVLLERSNCIASLWQLKTYDRLHLHLPKQFCELPIIPFPGDFPTYPTKQQFIEYLEDYARRFDIKPEFNQTVESAAFDENLGMWRVTSVGEEGTTEYVCRWLVAATGENAEPVVPRFEGMDKFAAAGVVKHTCHYKTGGDFAGKRVLVVGCGNSGMEVCLDLCNFGAQPSLVVRDAVHVLPREMLGTSTFGLSMFLLKWLPIRLVDRFLLVVSRFILGDTTLLGLNRPRLGPLELKNISGKTPVLDVGTLAKIKTGDIKVCSGIRRLKRHEVEFDNGKTERFDAIILATGYKSNVPSWLKENKMFSKKDGFPIQEFPEGWRGECGLYAVGFTKRGISGASMDAKRIAEDIHKCWKQDEQLQCKLGKRMKRKFSESDCGGN

SEQ ID NO: 5002 - protein, 157 aa, Arabidopsis thaliana
MQASRARLFKEYKEVQREKVADPDIQLICDDTNIFKWTALIKGPSETPYEGGVFQLAFSVPEPYPLQPPQVRFLTKIFHPNVHFKTGEICLDILKNAWSPAWTLQSVCRAIIALMAHPEPDSPLNCDSGNLLRSGDVRGFNSMAQMYTRLAAMPKKG

SEQ ID NO: 5003 - protein, 295 aa, Arabidopsis thaliana
MESMVCGRHLISYHTSLLCLLNIYLKTCPLESPRSSIKVSQSLKKTLSDSLHYHGRLQWLRQRGTMISAPRSGDYRCFLNHVSSYPLLTVFSLVQFAMVHSAIFVKLRFMFCLYVLDRLQNVCGFLNLHGSFHVREDPPILLQLITYLLQTLCVASSYTLSHEFALLKIFGISSLTHPCDINIFVQTSAKALRCVVLLVQTRRLPLAPSSTPFRLLTLAIRSSNDLFLEEASTTFDLTCSTKLLTFWFKALKDHLPSTSCYLVIFLVLTLGYALYYCAFNFGISDFSYLYICYLF

SEQ ID NO: 5004 - protein, 422 aa, Arabidopsis thaliana
MADLIPFYLNIVAFLCTVGAIALAIFHIYRHLLNYTEPTYQRYIVRIIFMVPVYAFMSFLSLVLPKSSIYFDSIREVYEAWVIYNFLSLCLAWVGGPGSVVLSLSGRSLKPSWSLMTCCFPPLTLDGRFIRRCKQGCLQFVILKPILVAVTLVLYAKGKYKDGNFNPDQAYLYLTIIYTISYTVALYALVLFYMACRDLLQPFNPVPKFVIIKSVVFLTYWQGVLVFLAAKSGFIKSAEAAAHFQNFIICVEMLIAAACHFYAFPYKEYAGANVGGSGSFSGSLSHAVKLNDFYHDTVHQFAPTYHDYVLYNHQDGGDEGTKKYRSRTFVPTGQEMDAMRKNKPVYANKIDGVSVSSSLSSEASSPKSSSVTSDPARSDAVKSSLLVDASDSLETMYDMSLIDIDLSSFPSNVPSASESGPR

SEQ ID NO: 5005 - protein, 853 aa, Arabidopsis thaliana
MEVVERKRSRGGFLNLFDWHGKSRKKLFSGSTSELSEESKQPAQNLLKSRVSLIEVDEIGKSSSNNQRSDSSCCASSVTSDDGQGTRAPSVVARLMGLESLPVPNVQEPRLNPDLDPFLLRPSQNTNRWDAYENLGYVNLRSDYDGISWDHLDSRTNNGRNQPIERFQSETFPPRSAKPICVTNNRHLSPIRSPGFVPSRNPIYVMEAASRMIEPSPRMVARTRFSPSNSPSSVPMRIQDLREKLEAAQKVSSRQNSNDTFNLKYPSGKHNEKRITTSLTTPSTSKFMGKSSTDGLKGKVKPSYVSAQAKAGTTPLSVTRNSANQKEKADAKKCVVKSQNALRGAPISMGKNMFKQNNQKQNCRDNQPSMTSVLNQKSSKVNNKVVNKVPVESGSISKQLGLSTASAEKNTSLSLSRKKTLPRSKKLPNGMQKSGISDDKRTKRSENMIKCNITIDGGLNKGKDDRKKEMDVISFTFSSPIKGLSSDSLSSTQGIGQDTDSAVSFNIGGDSLNALLEQKLRELTSKLESSSCSLTQEEPSYSIPMDEMNGMISFSSEYEKSTQNGLRKVLSESESVSDCTSFYDKQKFQIQAEEHEVSSISTVTEADDLRSSCSKGFSDCRQTAEYGTIQSSSDQELTWVSLNESHQAQDESELSESVVTLSYSEAEERLDWEFEYISEILGSDQLMVKEYALGMATDVLPASLFDEMEGRGEVTAAKIKRKTLFDFVNKCLALRCEQMFMGSCRGLLGKGGFLFEQRDWLAEELNREIHGLKKMREMMMDELVDKEMSSFEGRWLDFERETYEEGIDIEGEIVSTLVDDLVNDLVSGTQRRTLRQREGVVSALVEPHLLSAF

SEQ ID NO: 5006 - protein, 316 aa, Arabidopsis thaliana
MCISISQVSRLRIHSFGSSCCERVHGWIKNSSSLKLLDVRASSVDGKARWIRRNVSTTTQGSRSNTKSSVLGGTVPVTRIIDEESRTKVQPFGNLQQRLAQDKDLSKLLTVIVSDLETTGLHRKNERIIEIAAQDIAGGGYSTFQTLVNPGVVPITNAHIHGIRNDMVCRPEVPRMEELIPIFLRYVESRQKPGGYVMLVAHNGKSFDFQFLINEFNRCSYEIPHNWLLLDSLPLARENMKSVEPTVKLSSSLEALADYYSLTREGDAHRALSDVLLLSKVFQKLTIDLKLSLSDLVLRCHTASDISAAMAKNKKA

SEQ ID NO: 5007 - protein, 625 aa, Arabidopsis thaliana
MLISAEKGEILIPQSPLSSESVVPLVYTDVNVVPEHESNQLEKSISNLEEEVFELKLKLKSLDEKRKQVLNKIIDTKGSIRVFCRVRPFLLTERRPIREPVSFGPDNVVIRSAGSSKEFEFDKVFHQSATQEEVFGEVKPILRSALDGHNVCVLAYGQTGTGKTFTMDGTSEQPGLAPRAIKELFNEASMDQTHSVTFRMSMLEIYMGNLKDLLSARQSLKSYEASAKCNLNIQVDSKGSVEIEGLTEVEVMDFTKARWWYNKGRRVRSTSWTNVNETSSRSHCLTRITIFRRGDAVGSKTEVSKLWMIDLGGSERLLKTGAIGQTMDEGRAINLSLSALGDVIAALRRKKGHVPYRNSKLTQILKDSLGTRSKVLMLVHISPRDEDVGETICSLSFTKRARAVESNRGLTAELQKLREKKISELEEEMEETQEGCKKIKARLQEVECLVNEHKKLFWITNDKYLEDIEKKAISPLDHLKDTDATPISSDKLVKIRKSSGFVPRFMTSTVASRQRQTMSEKEINAKAQSIRSVAKNLTQFSTSQSLSLSDSRSKALLRRSYTKPLQAAANSGTPPETPKRHIKDNSLQRKNMNDTSSPRSKMVTSSDPNVRAKLCHHKRRMSSLT

SEQ ID NO: 5008 - protein, 536 aa, Arabidopsis thaliana
MVDTVIPGDMACLDADLLQLQEMSSFVLNSKPGFTQKLFDQWLSLPEAQRQVGSLLKDAVAGAPINVTGSASGSNSATIPSMFPAGSAPPLSPRSCGSPRTTKQRAPSNLGSTLKVVNEPVKEPIPQFYFQNGRPPPSEIKEQCMFRINHFFYGHMDGLQIQEFKLVTREICKLPSFFSTSLFRKIDLNNTGFVTRDAFIDFWVNGNMLIMDTTTQIFKILKQKDQSFIVKDDFKPLLKELLATHPGLEFLQSTPEFQERYAETVTYRIFYYINRSGNGRITFRELKRGNLIDAMLHADEEEDINKVLRYFSYEHFYVIYCKFWELDTDHDFLIDKENLMRYGNHALTYRIVDRIFSQVARKFTSKVEGKMGYEDFVYFILAEEDKSSVPSLEYWFKCIDLDANGIITRNEMQFFYEEQLHRMECMAQEAVLFEDILCQMIDMIGPENESHITLHDLKGSKLSGNVFNILFNLNKFMAFETRDPFLIRQERENPTLTDWDRFAHREYIRLSMEEDVEDASNGSAEVWDDSSLEAPF

SEQ ID NO: 5009 - protein, 173 aa, Arabidopsis thaliana
MDMNMEKIFEDSVPCRVRAKRGCATHPRSIAERAAMMMIRSGGSGGSGGVSCQDFGNQAKKDCSHMRCRTCCKSRGFECSTHVRSTWVPATKRRERQQQLATVQPQTQLPRGESVPKRHRENLPATSSSLVCTRIPFHSGICHCNVKYLFMCIYICLLLYGREIYNEMQAAFL

SEQ ID NO: 5010 - protein, 956 aa, Arabidopsis thaliana
MDDIDSSDGAAAARAGEIGSIGVSTPWKPIQLVFKRYLPQNGSASKVHVAVKKPVVVRLTRDLVETYKICDPQFKYRGELNPKRYLTTPSVGVNNDGFDNVNYDLILAVNDDFCSSDSRQRYIVKDLLGHGTFGQVAKCWVPETNSFVAVKVIKNQLAYYQQALVEVSILTTLNKKYDPEDKNHIVRIYDYFLHQSHLCICFELLDMNLYELIKINQFRGLSLSIVKLFSKQILLGLALLKDAGIIHCDLKPENILLCASVKPTEIKIIDFGSACMEDKTVYSYIQSRYYRSPEVLLGYQYTTAIDMWSFGCIVAELFLGLPLFPGGSEFDILRRMIEILGKQPPDYVLKEAKNTNKFFKCVGSVHNLGNGGTYGGLKSAYMALTGEEFEAREKKKPEIGKEYFNHKNLEEIVKSYPYKINLPEDDVVKETQIRLALIDFLKGLMEFDPAKRWSPFQAAKHPFITGEPFTCPYNPPPETPRVHVTQNIKVDHHPGEGHWFAAGLSPHVSGRTRIPMHNSPHFQMMPYSHANSYGSIGSYGSYNDGTIQDNSYGSYGGTGNMFAYYSPVNHPGLYMQNQGGVSMLGTSPDARRRVMQYPHGNGPNGLGTSPSAGNFAPLPLGTSPSQFTPNTNNQFLAGSPGHHGPTSPVRNSCHGSPLGKMAAFSQINRRMSAGYSGGSQSQDSSLSQAQGHGMDNFYQNEGYSGQFSGSPSRRQLDSGVKNRKQTQGGTTLSTGYSTHNNANSSLRSNMYNPSSTAHHLENPDTALSVPDPGDWDPNYSDDLLLEEDSADESSLANAFSRGMQLGSTDASSYSRRFNSNASTSSSNPTTQRRYAPNQAFSQVETGSPPSNDPHARFGQHIPGSQYIPHVSQNSPSRLGQQPPQRYNHGRPNAGRTMDRNHMNAQLPPSNTNSGGQQRSPRSSSYTNGVPWGRRTNNHVPNVPSTSHGRVDYGSIA

SEQ ID NO: 5011 - protein, 455 aa, Arabidopsis thaliana
MGSRDFISSLPDEVLGKKILSLLPTKLVVSTSVLSKRWRNLFHFVDSFDLEDSTPIRNADSFSDFMKDTVALLSNCPIKRLTLNSHYEKSSVNRWIRSALKRGCLELNLQSQYDHYLDIGIFFRNNTLVKLTLSSYRTFLRGNVPPEGRVFFPALKTLSLGAVVAKPALYNWLISGCPVLEELFILDVGSGDDQPTWTRSVVSASIKRLTIVFHFPHNTYPYEDDVEIKTPNLEFLDYSALRSDGSDVDYLDSLAEARLDLRLWELTNTFDFGEVTNLVSAIRNVKTLHLSSSSLEAFYYRCYTMPVFDKLIHLSIESDKENGWQALPRLLLKSPNLQTLAIKGLLHKVTYRCGNACACTSKPKKRYLYKRYEDDSPTSEVEGRCCLSTCRVKVLEISGYGGSLREVKQMEHFLRKLKYLETVKIGVEEDNDSEHLRTELMTLDIASSKCNIQFI

SEQ ID NO: 5012 - protein, 393 aa, Arabidopsis thaliana
MAEIQSNGRAYESLLEKVLSMNILSSDYFKELYGLKTYHEVIDEIYNQVNHVEPWMGGNCRGPSTAYCLLYKFFTMKLTVKQMHGLLKHTDSPYIRAVGFLYLRYVADAKTLWTWYEPYIKDDEEFSPGSNGRMTTMGVYVRDLLLGLYYFDTLFPRIPVPVMRQIVSNLEKMNLPTKPSGSTGDMTRGSEDTARRPPSVKASLSVSFGQRAPHRASTRGSSPVRRPPPTGYDRNGGDEVQQRSPRRSQSRDYYSDRDSDRQREREREKDRERERGRDRYRERERDYGNDRRSRRDYDSRSRRNDYEDDRSRHDRRSRSRSRSRSRSVQIEREPTPKRDSSNKEKSAVTVNSNLAKLKDLYGDASSQKRDEGFGTRKDSSSEEVIKLGGSSWR

SEQ ID NO: 5013 - protein, 431 aa, Arabidopsis thaliana
MECNKDEATRAKEIAENKFKMKDIAGAKKFALKAQNLYPEIEGVSQMLATLDVYIAAENKVNEDVDWYGILNASPRDDDETLKRKYRKLALMLHPDKNKSIGAEGAFKHVSEAWKFLSDKEKRAAYDRRKSLHSVYQKVSVSSSNNGFCNFAKTTFTTNARTTTPRNNPPAQKTNPPAQKTNPPAQKTNPPAQKNNPPTQKNNPQKPVGTTQKTGRTDNHTTTPNSFTASGSSDQSKSNTFWTVCRRCMMQYEYLRVYVNCNLRCPNCLQSYLAVEVPKPGISSRWSSCSRLKSAANHNTTSGLFNNSKWTFSRTSSAAHAASVVQHAYEKVKKDREQAKATARREKKNAKRKSTTDSSASGSSLKKRKVCLETDIGCSSGREVTYRVTGENGKNMGKLEHGTKESADKLSLRRTQRKISKENVTREVKSR

SEQ ID NO: 5014 - protein, 410 aa, Arabidopsis thaliana
MDKINGLPDDLLVKILSYVPTDIAVSTSILSKRWEFLWMWLPNLDYTSRWCRKPGDVGLRDFIHKNLPLHRAPVIESLRFHSNSPDIKPEDIRRWIEIAVSRHVHDLDIDHFSENENIFLSSFFACKSLVTLKLRSVTLRDIPSMVCLPSLKTLLLDNVSFVEGKSLQELLSICPVLEDLSVYCDDYENTKELTIVVPSLLSLSLYIPDEWLLDGYWIDTPSLEYLKLEDWNSCDHLSLIKNMPKLREAYVDAKCFLPKSVIESITSVKHLTICSKDGYGDGFVFNQLEHLTLCVCRGDSPSLLGQLLKDSPNLRILEISVMEDHVDDVGISLDGWNQPSSVPECLLSSLQIFKWPQYLGRPEDRDIAVYILKNARHLKKTTILADRCERFVTQRRMIKELLQALPARIC

SEQ ID NO: 5015 - protein, 465 aa, Arabidopsis thaliana
MGAMMVMMGLLLIIVSLCSALLRWNQMRYTKNGLPPGTMGWPIFGETTEFLKQGPNFMRNQRLRYGSFFKSHLLGCPTLISMDSEVNRYILKNESKGLVPGYPQSMLDILGTCNMAAVHGSSHRLMRGSLLSLISSTMMRDHILPKVDHFMRSYLDQWNELEVIDIQDKTKHMAFLSSLTQIAGNLRKPFVEEFKTAFFKLVVGTLSVPIDLPGTNYRCGIQARNNIDRLLRELMQERRDSGETFTDMLGYLMKKEGNRYPLTDEEIRDQVVTILYSGYETVSTTSMMALKYLHDHPKALQELRAEHLAFRERKRQDEPLGLEDVKSMKFTRAVIYETSRLATIVNGVLRKTTRDLEINGYLIPKGWRIYVYTREINYDANLYEDPLIFNPWRWMKKSLESQNSCFVFGGGTRLCPGKELGIVEISSFLHYFVTRYRWEEIGGDELMVFPRVFAPKGFHLRISPY

SEQ ID NO: 5016 - protein, 249 aa, Arabidopsis thaliana
MIIAKQYRCIHSATCHCTKGHLSEEVLFLMVQHLNWNPNVIATLSCVCKWFDDLAKRLLWKEFCRARAPKMMSDLQSSGSHSVDGSWRALGKLLIYCSGSSKGGLFNDVQISGHFVHRTRFSRTSGRSFLPPQCRTDDILYVSDPCEHLDQGEDGDLGFFRGIFKSFSMSKVRKLLIKKGTPFHPTEVCPYCKAKLWSMLQAKMIPQSASCRLGAYEDSIEYYVCLNGHMLGVCTLLPLSDSEGASEFQ

SEQ ID NO: 5017 - protein, 579 aa, Arabidopsis thaliana
MNQMRNGDLGSESFGTCLLLSLPEDVIAVIARFVSPRDICNLSLCCKSLCDVVDSERIWLVQCEVVKVLPLSEIIQWRIGISSYKALCWFLGEVMKPLVGVWVHQNPELGNVVYVMPGFLSVVGCRIIPQEVGPLGIEEARVMWSPVFEIICGFDGSAKFFLHGRDGKVQCCLHPGFVRGIEKSCNVLLLEVETRREKKLCNEIDETVLLVETGVQLPFRKLPFSYRRNLLHIVTSTVGIPVPDLSSEKLFPTSKDDEAVLLERRTMLLKMHKFGGDWNHMNLEDECTNIPNQVDINKSWKHLGFEGDIRNMDAENQTQRKSFSRYFRSGIKHILGRSSSSKNMSSSRSETRPLNLQKFLNFGDSIGLSLKASNIKLSSYQGWPNMDETRYALYKLPIKDPIANDEYAGLWGGTFGWPPGKCTEDKPGKAFFLLMLSYEESQDGTERLLIGTKILEGTHYGMHPNGSAMFVIKIDSPSFEGFPFDTNGEDFEHSYAGEGTAKGYGFRYPGYKPGTLFVTSKGLLMFIWKATKAVLTLQRLNLGELLRKGVCVSPLPPCLNFAYLIKCHTNVFAPERRRS

SEQ ID NO: 5018 - protein, 136 aa, Arabidopsis thaliana
MDSIMCVSSWKFYTMNDSWMYLDAFVYQWMILSYLIGNFSGICSKTYCPYCVRVKELLQQLGAKFKAVELDTESDGSQIQSGLAEWTGQRTVPNVFIGGNHIGGCDATSNLHKDGKLVPLLTEAGAIAGKTATTSA

SEQ ID NO: 5019 - protein, 515 aa, Arabidopsis thaliana [sequence omitted]

SEQ ID NO: 5020 - protein, 307 aa, Arabidopsis thaliana
MVGGGVIRQLLRRKLHSQSVATPVLSWLSSKKANEDAGSAGLRAFALMGAGITGLLSFSTVASADEAEHGLECPNYPWPHEGILSSYDHASIRRGHQVYQQVCASCHSMSLISYRDLVGVAYTEEEAKAMAAEIEVVDGPNDEGEMFTRPGKLSDRLPEPYSNESAARFANGGAYPPDLSLVTKARHNGQNYVFALLTGYRDPPAGISIREGLHYNPYFPGGAIAMPKMLNDEAVEYEDGTPATEAQMGKDVVSFLSWAAEPEMEERKLMGFKWIFLLSLALLQAAYYRRLKWSVLKSRKLVLDVVN

SEQ ID NO: 5021 - protein, 621 aa, Arabidopsis thaliana
MGLPHTASNEQAHEALSAPSCSLSQSLPVNATSCDSDGINRGNEGSFRFSIGESDRKTAVESLEFRDDLWRFHDTRSVTSLPAHEPTYAMDKVNLSRTEVRRIVGFESNEVSSVSNEYTSITVNRTGGSNEVDIIGGSLVRKRVSSPLNKLFPEKFRGDSLDISHSNQPMTSAGLPKGFHIPVGQDHKKANISGRLRLFTTSNCSEWGNDTSHTGKLSSTVFTDGPLLDSNDLQPSQDVHCLYSPVHETFQVPNKPLPCHRNISVSPPLSLSPLGPRFSERMKALQGGLNGNIFEDDVCLKNTGEEAELRTGHRSFDDTNGIQRAFSMDRAIESVPTSPCKRFSRSLSGRPIQRSLVGSFEESLFSGRLSYGQANQKIDGFLAILSIAGGNISPKSQKLPFSVTSVGDDCFLLYYASIDLSGGSLPSKLWGQKLKTNQNKSDAQTINKRLRIPMKGRIQLVLSNPEKTPLHTFLCNYDLTDMPHGTKTFLRQKVTLASSVPTKAKKSANKGSEGSELVDELHSPNECGNKNCRETYRETGQRCSKSGVLRYALHLKFICPLRKKASKLGQKKSLDAGDDGERRFYLYNELRVVFPQRHTDSDEGKLNVEYHYPENPRYFDV

SEQ ID NO: 5022 - protein, 611 aa, Arabidopsis thaliana
MARDQFYGHNNHHHQEQQHQMINQIQGFDETNQNPTDHHHYNHQIFGSNSNMGMMIDFSKQQQIRMTSGSDHHHHHHQTSGGTDQNQLLEDSSSAMRLCNVNNDFPSEVNDERPPQRPSQGLSLSLSSSNPTSISLQSFELRPQQQQQQGYSGNKSTQHQNLQHTQMMMMMMNSHHQNNNNNNHQHHNHHQFQIGSSKYLSPAQELLSEFCSLGVKESDEEVMMMKHKKKQKGKQQEEWDTSHHSNNDQHDQSATTSSKKHVPPLHSLEFMELQKRKAKLLSMLEELKRRYGHYREQMRVAAAAFEAAVGLGGAEIYTALASRAMSRHFRCLKDGLVGQIQATSQALGEREEDNRAVSIAARGETPRLRLLDQALRQQKSYRQMTLVDAHPWRPQRGLPERAVTTLRAWLFEHFLHPYPSDVDKHILARQTGLSRSQVSNWFINARVRLWKPMIEEMYCEETRSEQMEITNPMMIDTKPDPDQLIRVEPESLSSIVTNPTSKSGHNSTHGTMSLGSTFDFSLYGNQAVTYAGEGGPRGDVSLTLGLQRNDGNGGVSLALSPVTAQGGQLFYGRDHIEEGPVQYSASMLDDDQVQNLPYRNLMGAQLLHDIV

SEQ ID NO: 5023 - protein, 810 aa, Arabidopsis thaliana
MATNSTKACPAPMKATSNGVFQGDNPIDFALPLAILQIVIVIVLTRVLAYLLRPLRQPRVIAEVIGGIMLGPSLLGRSKAFLDAVFPKKSLTVLETLANLGLLFFLFLAGLEIDTKALRRTGKKALGIALAGITLPFALGIGSSFVLKATISKGVNSTAFLVFMGVALSITAFPVLARILAELKLLTTEIGRLAMSAAAVNDVAAWILLALAIALSGSNTSPLVSLWVFLSGCAFVIGASFIIPPIFRWISRRCHEGEPIEETYICATLAVVLVCGFITDAIGIHSMFGAFVVGVLIPKEGPFAGALVEKVEDLVSGLFLPLYFVASGLKTNVATIQGAQSWGLLVLVTATACFGKILGTLGVSLAFKIPMREAITLGFLMNTKGLVELIVLNIGKDRKVLNDQTFAIMVLMALFTTFITTPVVMAVYKPARRAKKEGEYKHRAVERENTNTQLRILTCFHGAGSIPSMINLLEASRGIEKGEGLCVYALHLRELSERSSAILMVHKVRKNGMPFWNRRGVNADADQVVVAFQAFQQLSRVNVRPMTAISSMSDIHEDICTTAVRKKAAIVILPFHKHQQLDGSLETTRGDYRWVNRRVLLQAPCSVGIFVDRGLGGSSQVSAQDVSYSVVVLFFGGPDDREALAYGLRMAEHPGIVLTVFRFVVSPERVGEIVNVEVSNNNNENQSVKNLKSDEEIMSEIRKISSVDESVKFVEKQIENAAVDVRSAIEEVRRSNLFLVGRMPGGEIALAIRENSECPELGPVGSLLISPESSTKASVLVIQQYNGTGIAPDLGAAETEVLTSTDKDSD

SEQ ID NO: 5024 - protein, 296 aa, Arabidopsis thaliana
MIGSFLTRGLVMVLGYAYPAYECYKTVEKNRPEIEQLRFWCQYWILVACLTVFERVGDAFVSWVPMYSEAKLAFFIYLWYPKTRGTTYVYESFFRPYLSQHENDIDHSLLELRTRAGDMAVIYWQRVASYGQTRILEILQYVAAQSTPRPQPPQKRGGRANQAPAKPKKAPVPQSEPEEVSLSSSSSSSSSENEGNEPTRKVSGPSRPRPTVTSVPAADPKNAGTTQIAQKSVASPIVNPPQSTTQVEPMQIEEVEGEAESGNENPNPEGPKETVMEETIRMTRGRLRKTRSEESR

SEQ ID NO: 5025 - protein, 480 aa, Arabidopsis thaliana
MDRVVGGKYKLGRKLGSGSFGELFLGVNVQTGEEVAVKLEPARARHPQLHYESKLYMLLQGGTGIPHLKWYGVEGEYNCMVIDLLGPSMEDLFNYCSRRFNLKTVLMLADQMINRVEYMHVRGFLHRDIKPDNFLMGLGRKANQVYIIDYGLAKKYRDLQTHRHIPYRENKNLTGTARYASVNTHLGIEQSRRDDLESLGYVLMYFLRGSLPWQGLRAGTKKQKYDKISEKKRLTPVEVLCKSFPPEFTSYFLYVRSLRFEDKPDYPYLKRLFRDLFIREGYQFDYVFDWTILKYPQFSSGSSSSSKPRSSLRPAMNPPVPIAERPDKPSAGAGQDSRDRFSGALEAYARRNGSGSGVVQADRSRPRTSENVLASSKDTTPQNYERVERPISSTRHASSSRKAVVSSVRATSSADFTENRSSRVVPSNGRSSTAQRTQLVPDPTTRPSSSSFTRAAPSRTARDITLQSFELLTIGNGKRK

SEQ ID NO: 5026 - protein, 988 aa, Arabidopsis thaliana
MPIRQMKDSSETHLVIKTQPLKHHNPKTVQNGKIPPPSPSPVTVTTPATVTQSQASSPSPPSKNRSRRRNRGGRKSDQGDVCMRPSSRPRKPPPPSQTTSSAVSVATAGEIVAVNHQMQMGVRKNSNFAPRPGFGTLGTKCIVKANHFLADLPTKDLNQYDVTITPEVSSKSVNRAIIAELVRLYKESDLGRRLPAYDGRKSLYTAGELPFTWKEFSVKIVDEDDGIINGPKRERSYKVAIKFVARANMHHLGEFLAGKRADCPQEAVQILDIVLRELSVKRFCPVGRSFFSPDIKTPQRLGEGLESWCGFYQSIRPTQMGLSLNIDMASAAFIEPLPVIEFVAQLLGKDVLSKPLSDSDRVKIKKGLRGVKVEVTHRANVRRKYRVAGLTTQPTRELMFPVDENCTMKSVIEYFQEMYGFTIQHTHLPCLQVGNQKKASYLPMEACKIVEGQRYTKRLNEKQITALLKVTCQRPRDRENDILRTVQHNAYDQDPYAKEFGMNISEKLASVEARILPAPWLKYHENGKEKDCLPQVGQWNMMNKKMINGMTVSRWACVNFSRSVQENVARGFCNELGQMCEVSGMEFNPEPVIPIYSARPDQVEKALKHVYHTSMNKTKGKELELLLAILPDNNGSLYGDLKRICETELGLISQCCLTKHVFKISKQYLANVSLKINVKMGGRNTVLVDAISCRIPLVSDIPTIIFGADVTHPENGEESSPSIAAVVASQDWPEVTKYAGLVCAQAHRQELIQDLYKTWQDPVRGTVSGGMIRDLLISFRKATGQKPLRIIFYRDGVSEGQFYQVLLYELDAIRKACASLEPNYQPPVTFIVVQKRHHTRLFANNHRDKNSTDRSGNILPGTVVDTKICHPTEFDFYLCSHAGIQGTSRPAHYHVLWDENNFTADGIQSLTNNLCYTYARCTRSVSIVPPAYYAHLAAFRARFYLEPEIMQDNGSPGKKNTKTTTVGDVGVKPLPALKENVKRVMFYC

SEQ ID NO: 5027 - protein, 416 aa, Arabidopsis thaliana
MGCLLGCFGRRKNRRRQRRRESFQPRLNRISEEAAKDVLLNLRVPTVEEVPKYAKDSTVMEVPKISEVSPKDNHVNVVEKVPTVSVTPITDICDKVEEKQSPSPSPNRKRVTFDTNVKTYEHIAVDESVELFEEKKEEVKSRQARCSSEGSDVTSNSSGSYPSNHRYQNCRESDDEEEDVTDCDDSDLEDTDDDDCGLLDDDYYNDDNYEDKLHNWDKVVYTEEIADNVMDIERVEEKGSVSVRDRSGYVNAVLNPIENLSQWKAVKAKGRTTTQTQPRKENVIIASFSLESQVDDLSSTFSLNRKSRDETEKQRTQEIAVDASLSTWLSTSQTTTSGCSSVETTMSEKKKYSKLVQCHDERPILGALTAEEIKQFSATNSPRKSPSRSPESPIIGTVGGYWNSHSMATNKYSRSS

SEQ ID NO: 5028 - protein, 75 aa, Arabidopsis thaliana
MATKTSNLGHLLLSLFILLLFILSQVGVAQAKRLQQRNKLRLDCVPLPPPPPPLRGIVKPPIASFHSASPKDKGP

SEQ ID NO: 5029 - protein, 2223 aa, Arabidopsis thaliana
MKDSGSEMIKRDWVMKQKRRKLPSILDILDQKVDSSMAFDSPEYTSSSKPSKQRLKTDSTPERNSSKRKGNDGNYFECVICDLGGDLLCCDSCPRTYHTACLNPPLKRIPNGKWICPKCSPNSEALKPVNRLDAIAKRARTKTKKRNSKAGPKCERASQIYCSSIISGEQSSEKGKSISAEESKSTGKEVYSSPMDGCSTAELGHASADDRPDSSSHGEDDLGKPVIPTADLPSDAGLTLLSCEDLSESKLSDTEKTHEAPVEKLEHASSEIVENKTVAEMETGKGKRKKRKRELNDGESLERCKTDKKRAKKSLSKVGSSSQTTKSPESSKKKKKKNRVTLKSLSKPQSKTETPEKVKKLPKEERRAVRATNKSSSCLEDTNSLPVGNLQVHRVLGCRIQGLTKTSLCSALSDDLCSDNLQATDQRDSLVQDTNAELVVAEDRIDSSSETGKSSRDSRLRDKDMDDSALGTEGMVEVKEEMLSEDISNATLSRHVDDEDMKVSETHVSVERELLEEAHQETGEKSTVADEEIEEPVAAKTSDLIGETVSYEFLVKWVDKSNIHNTWISEAELKGLAKRKLENYKAKYGTAVINICEDKWKQPQRIVALRVSKEGNQEAYVKWTGLAYDECTWESLEEPILKHSSHLIDLFHQYEQKTLERNSKGNPTRERGEVVTLTEQPQELRGGALFAHQLEALNWLRRCWHKSKNVILADEMGLGKTVSASAFLSSLYFEFGVARPCLVLVPLSTMPNWLSEFSLWAPLLNVVEYHGSAKGRAIIRDYEWHAKNSTGTTKKPTSYKFNVLLTTYEMVLADSSHLRGVPWEVLVVDEGHRLKNSESKLFSLLNTFSFQHRVLLTGTPLQNNIGEMYNLLNFLQPSSFPSLSSFEERFHDLTSAEKVEELKKLVAPHMLRRLKKDAMQNIPPKTERMVPVELTSIQAEYYRAMLTKNYQILRNIGKGVAQQSMLNIVMQLRKVCNHPYLIPGTEPESGSLEFLHDMRIKASAKLTLLHSMLKVLHKEGHRVLIFSQMTKLLDILEDYLNIEFGPKTFERVDGSVAVADRQAAIARFNQDKNRFVFLLSTRACGLGINLATADTVIIYDSDFNPHADIQAMNRAHRIGQSKRLLVYRLVVRASVEERILQLAKKKLMLDQLFVNKSGSQKEFEDILRWGTEELFNDSAGENKKDTAESNGNLDVIMDLESKSRKKGGGLGDVYQDKCTEGNGKIVWDDIAIMKLLDRSNLQSASTDAADTELDNDMLGSVKPVEWNEETAEEQVGAESPALVTDDTGEPSSERKDDDVVNFTEENEWDRLLRMRWEKYQSEEEAALGRGKRLRKAVSYREAYAPHTSGPVNESGGEDEKEPEPELKKEYTPAGRALKEKFTKLRERQKNLIARRNSVEESLPSGNVDQVTEVANQDEESPTSMDLDDSKASQQCDAQKRKASSSDPKPDLLSQHHHGAECLPSLPPNNLPVLGLCAPNFTQSESSRRNYSRPGSRQNRPITGPHFPFNLPQTSNLVEREANDQEPPMGKLKPQNIKEEPFQQPLSNMDGWLPHRQFPPSGDFERPRSSGAAFADFQEKFPLLNLPFDDKLLPRFPFQPRTMGTSHQDIMANLSMRKRFEGTGHSMQDLFGGTPMPFLPNMKIPPMDPPVFNQQEKDLPPLGLDQFPSALSSIPENHRKVLENIMLRTGSGIGHVQKKKTRVDAWSEDELDSLWIGIRRHGYGNWETILRDPRLKFSKFKTPEYLAARWEEEQRKFLDSLSSLPSKSSRTDKSTKSSLFPGLPQGIMNRALHGKYATPPRFQSHLTDIKLGFGDLASPLPLFEPSDHLGFRSEHFPPMANLCTDNLPGEPSAGPSERAGTSTNIPNEKPFPLNSLGMGNLGSLGLDSLSSLNTLRAEEKRDAIKRGKLPLFLDMPLPQMLDSSNNVFLGRSANPSFLHPNRGLNPSNPMGRDIMGISSSENKLPHWLRNVVTVPTVKSPEPPTLPPTVSAIAQSVRVLYGEDSTTIPPFVIPEPPPPAPRDPRHSLRKKRKRKLHSSSQKTTDIGSSSHNAVESSSQGNPQTSATPPLPPPSLAGETSGSSQPKLPPHNLNSTEPLSSEAIIIPPPEEDSVIAAAPSEAPGPSLEGITGTTKSISLESQSSEPETINQDGDLDPETDEKVESERTPLHSDEKQEEQESENALNKQCEPIEAESQNTNAEEEAEAQEEDEESMKMVTGNSLSDD

SEQ ID NO: 5030 - protein, 435 aa, Arabidopsis thaliana
MDRDYISELPDSLLTQILLELRTKDSVKTSVLSKRWRNLWLNVPGLELFTLQFTYPDREEIFVRFMDRFMEFKCRSRLKKFMITYVDCKGYRDRLMELIGTLVDHGLQHLYVFMHTFDRVDFKRQNIYKSKTLVSLKLHNVELKNSDFVVSLPCLKILKLENICHGEDGPLVVEKLISGCSVLEDLELIRPFDIRTHKVLLLLRVSSQTLKSFTLHFAIYKDRTDFSVEIDAPRLKYMTVEQSQSDSIVVKNLSSLFSIDIGTKFNPLRHEDLRMRNVFYDFLTGISSVKHMIICLWSLQRFSPYSKPGLIPKFQNLYHLKAQMWSSSTHLLEAFLESCPNLKNLILEYNVELDREQVDFTNVPQCLISTLEYVEIKEPNEKSTIKLVNYFLENSAVLKKLTLRFSYSSSIYLKSYKKLLTSTKLSPTCQVIFGC

SEQ ID NO: 5031 - protein, 294 aa, Arabidopsis thaliana
MAVEARHMNLFSSQYITNRECVKSQTNMNNGQQIAGGGFPVTIGDRNLQYIDPINSFNKSESELTAISKRQRDSTFDSDALIASQKRRAIAFSPASLIDAELVSQIQQQNSEIDRFVAQQTETLRIELEARQRTQTRMLASAVQNAILKKLKAKDEEIIRMGKLNWVLQERVKNLYVENQIWRDLAQTNEATANNLRSNLEQVLAQVDDLDAFRRPLVEEADDAESSCGSCDGGDVTAVVNGGCKRCGELTASVLVLPCRHLCLCTVCGSSALLRTCPVCDMVMTASVHVNMSS

SEQ ID NO: 5032 - protein, 499 aa, Arabidopsis thaliana
MERYTLLKEVGDGTFGNVWRAVNKQTNEVVAIKRMKKKYFSWEECVNLREVKSLSRMNHPNIVKLKEVIRENDILYFVFEYMECNLYQLMKDRPKHFAESDIRNWCFQVFQGLSYMHQRGYFHRDLKPENLLVSKDVIKIADLGLAREIDSSPPYTEYVSTRWYRAPEVLLQSYVYTSKVDMWAMGAIMAELLSLRPLFPGASEADEIYKICSVIGSPTEETWLEGLNLASVINYQFPQFPGVHLSSVMPYASADAVNLIERLCSWDPCNRPTTAEALQHPFFQSCYYIPPSLRPKLSEPRGSLEQQQSVKRLPAAPTYNANKPLNTYVTPKTNAPFSNGVNSYVTPKTNAPFSNGVNSYVTAKTNAPFSNGVNNYVAPKMNAPFDNGATQQKVDTTNNNNQNTAWNNKPVRSYNVKDSKYRPPGRKSPLAASMEKNWVFSRGASETANKLANATIGGRWTQSQRQQQPAMKAGWVGESGDMFLRPTQPSNPYSRKIAG

SEQ ID NO: 5033 - protein, 866 aa, Arabidopsis thaliana
MVEVIPKHIKDVWDRWNIRGAVILSLTLQAILICFSPLRKRTPRRLLIVLVWSSYLLADWSANFAVGLISKNQGKDLKPDDPPQDKKVMALWAPFLLLHLGGPDTITAFALEDNALWLRHVFGLVFQAIAGVYVVVMSLPNSLWVVIVLVFVSGTIKYLERTTALYSASLDKFRDSMIQAPDPGPNYAKLMEEYKAKKEARLPTKIVLIDEPDKENRPKKLEHPALASKKRKKDLTDLEIVQYAYKFFNTFKGLVVNLIFSFRERDESLEIFENLNDPEEALRIIEIELGFLYDALFTKIAILHTGIGTVSRVFASGTLVAAFIIFHKKPNKGTDFHGADVVVTYTLFAVGLVLDFISILLFLFSDWTCAAYSSLKDDPDELQSWQERCFNWLLKFRKLRWTPQECHKTGMHKCTKEGLKPCIMKGADKKEGGNKNEGGNKKEGDDKKEAADKCSLVDKHDVLTTRFFLRRWSGSINVFNFIAYATKADVERIHDARGSFRRYSWKIITFPFKKLNFVIKKIFGSIVKLINEVHRRISHEVNALSRKHLWARRFLYPIYFEFISRIPHFIKSVWDILSEFFDISDTLDMVHKTLFVHGEPMTRELWKFIFEELKNKSKYGDSPENAKRISLARGEWTLRENLPVDAEREKLVRYVTKVDYDQSLLMWHIATELCYQQHEKETIPEGYDEQRKHYSNREFSKIISDYMMYLLILQPGLMSEVAGIGKIRFRDTLAETHKFFQRRHIENDRSVETATLNILDVESEIEPMGVKGDRSKSVLFDASRLAKDLAEMEKTHNKDKWEILSKVWVELLCYAACHCDSTAHVEQLSRGGELINFVWLLMAHFGLTDQFQINKGDARAKLIIGK

SEQ ID NO: 5034 - protein, 345 aa, Arabidopsis thaliana
MDENNGGSSSLPPFLTKTYEMVDDSSSDSVVAWSENNKSFIVKNPAEFSRDLLPRFFKHKNFSSFIRQLNTYGFRKVDPEKWEFLNDDFVRGRPYLMKNIHRRKPVHSHSLVNLQAQNPLTESERRSMEDQIERLKNEKEGLLAELQNQEQERKEFELQVTTLKDRLQHMEQHQKSIVAYVSQVLGKPGLSLNLENHERRKRRFQENSLPPSSSHIEQVEKLESSLTFWENLVSESCEKSGLQSSSMDHDAAESSLSIGDTRPKSSKIDMNSEPPVTVTAPAPKTGVNDDFWEQCLTENPGSTEQQEVQSERRDVGNDNNGNKIGNQRTYWWNSGNVNNITEKAS

SEQ ID NO: 5035 - protein, 439 aa, Arabidopsis thaliana
MDKNGIVLMRKYELGRLLGQGTFAKVYHARNIKTGESVAIKVIDKQKVAKVGLIDQIKREISVMRLVRHPHVVFLHEVMASKTKIYFAMEYVKGGELFDKVSKGKLKENIARKYFQQLIGAIDYCHSRGVYHRDLKPENLLLDENGDLKISDFGLSALRESKQQDGLLHTTCGTPAYVAPEVIGKKGYDGAKADVWSCGVVLYVLLAGFLPFHEQNLVEMYRKITKGEFKCPNWFPPEVKKLLSRILDPNPNSRIKIEKIMENSWFQKGFKKIETPKSPESHQIDSLISDVHAAFSVKPMSYNAFDLISSLSQGFDLSGLFEKEERSESKFTTKKDAKEIVSKFEEIATSSERFNLTKSDVGVKMEDKREGRKGHLAIDVEIFEVTNSFHMVEFKKSGGDTMEYKQFCDRELRPSLKDIVWKWQGNNNNSNNEKIEVIH

SEQ ID NO: 5036 - protein, 300 aa, Arabidopsis thaliana
MAVQAHHHPSTLFFLNNGQEGNDQPHKSQFHSINAGVDTRKRAREVSSVIDLDITAAPMNPPPQTPPQVIGRRQNPNVVSTGLRLSREQSQNQEQRFLSFPITGDVAGEIKSQTDELNRFLQIQGEQLKRMLAENSERNYRELLRTTEESVRRRLREKEAEIEKATRRHVELEARATQIETEARAWQMRAAAREAEATSLQAQLHQAVVVAHGGGVITTVEPQSGSVDGVDEAEDAESAYVDPDRVEMIGPGCRICRRRSATVLALPCRHLVMCTECDGSVRICPLCLSTKNSSVEVFYS

SEQ ID NO: 5037 - protein, 410 aa, Arabidopsis thaliana
MNCLFLFKSKKPRKQQKDNNKNKRKGKELLQNSAPELTNRSETSSFNLQTPRSLPSPRSIKDLYTEREQNLRVFSYEELSKATYVFSRKLVIGEGGFGIVYKGKILSNGDSSDPPLVVAIKKLNRQGLQGHKQWLAEVQFLGVVNHPNVVKLIGYCSEDGETGIERLLVYEYMSNRSLEDHLFPRRSHTLPWKKRLEIMLGAAEGLTYLHDLKVIYRDFKSSNVLLDDQFCPKLSDFGLAREGPDGDNTHVTTARVGTHGYAAPEYVQTGHLRLKSDVYSFGVVLYEIITGRRTIERNKPVAERRLLDWVKEYPADSQRFSMIVDPRLRNNYPAAGARSLAKLADLCLKKNDKERPTMEIVVERLKKIIEESDSEDYPMATTTTKESSQVRRRQVAKPEKQSLRGVSVRG

SEQ ID NO: 5038 - protein, 213 aa, Arabidopsis thaliana
MGCFHSTAAREFPDHENPVKLASETAFSVSEVEALYELFKSISSSVVDDGLINKEEFQLALFKNRKKENLFANRIFDLFDVKRKGVIDFGDFVRSLNVFHPNASLEEKTDFTFRLYDMDCTGFIERQEVKQMLIALLCESEMKLADDTIEMILDQTFEDADVDRDGKIDKTEWSNFVIKNPSLLKIMTLPYLRDITTTFPSFVFNSEVDEIAT

SEQ ID NO: 5039 - protein, 243 aa, Arabidopsis thaliana
MYGQCNIESDYALLESITRHLLGGGGENELRLNESTPSSCFTESWGGLPLKENDSEDMLVYGLLKDAFHFDTSSSDLSCLFDFPAVKVEPTENFTAMEEKPKKAIPVTETAVKAKHYRGVRQRPWGKFAAEIRDPAKNGARVWLGTFETAEDAALAYDIAAFRMRGSRALLNFPLRVNSGEPDPVRITSKRSSSSSSSSSSSTSSSENGKLKRRRKAENLTSEVVQVKCEVGDETRVDELLVS

SEQ ID NO: 5040 - protein, 843 aa, Arabidopsis thaliana
MNCCWQVVEPCYKSALSYLCVKVGNICMLKENLVLLKSAFDELKAEKEDVVNRVNAGELKGGQRLAIVATWLSQVEIIEENTKQLMDVASARDASSQNASAVRRRLSTSGCWFSTCNLGEKVFKKLTEVKSLSGKDFQEVTEQPPPPVVEVRLCQQTVGLDTTLEKTWESLRKDENRMLGIFGMGGVGKTTLLTLINNKFVEVSDDYDVVIWVESSKDADVGKIQDAIGERLHICDNNWSTYSRGKKASEISRVLRDMKPRFVLLLDDLWEDVSLTAIGIPVLGKKYKVVFTTRSKDVCSVMRANEDIEVQCLSENDAWDLFDMKVHCDGLNEISDIAKKIVAKCCGLPLALEVIRKTMASKSTVIQWRRALDTLESYRSEMKGTEKGIFQVLKLSYDYLKTKNAKCFLYCALFPKAYYIKQDELVEYWIGEGFIDEKDGRERAKDRGYEIIDNLVGAGLLLESNKKVYMHDMIRDMALWIVSEFRDGERYVVKTDAGLSQLPDVTDWTTVTKMSLFNNEIKNIPDDPEFPDQTNLVTLFLQNNRLVDIVGKFFLVMSTLVVLDLSWNFQITELPKGISALVSLRLLNLSGTSIKHLPEGLGVLSKLIHLNLESTSNLRSVGLISELQKLQVLRFYGSAAALDCCLLKILEQLKGLQLLTVTVNNDSVLEEFLGSTRLAGMTQGIYLEGLKVSFAAIGTLSSLHKLEMVNCDITESGTEWEGKRRDQYSPSTSSSEITPSNPWFKDLSAVVINSCIHLKDLTWLMYAANLESLSVESSPKMTELINKEKAQGVGVDPFQELQVLRLHYLKELGSIYGSQVSFPKLKLNKVDIENCPNLHQRPL

SEQ ID NO: 5041 - protein, 892 aa, Arabidopsis thaliana
MAIYYKFKSARDYDTIAMDGPFISVGILKDKIFETKHLGTGKDLDIVVSNAQTNEEYLDEAMLIPKNTSVLIRRVPGRPRITVITTQEPRIQNKVEDVQAETTNFPVADPSAAEFPEDEYDEFGTDLYSIPDTQDAQHIIPRPHLATADDKVDEESKIQALIDTPALDWQQRQGQDTFGAGRGYGRGMPGRMNGRGFGMERKTPPPGYVCHRCNIPGHFIQHCPTNGDPNYDVKRVKPPTGIPKSMLMATPDGSYSLPSGAVAVLKPNEDAFEKEMEGLPSTTRSVGELPPELKCPLCKEVMKDAALTSKCCYKSFCDKCIRDHIISKSMCVCGRSDVLADDLLPNKTLRDTINRILEAGNDSTENVGSVGHIPDLESARCPPPKALSPTTSVASKGEKKPVLSNNNDASTLKAPMEVAEITSAPRASAEVNVEKPVDACESTQGSVIVKEATVSKLNTQAPKEEMQQQVAAGEPGKKKKKKPRVPGNDMQWNPVPDLAGPDYMMQMGPGPQYFNGMQPGFNGVQPGFNGVQPGFNGFHPGFNGFGGPFPGAMPPFMGYGLNPMDMGFGGGMNMMHPDPFMAQGFGFPNIPPPHRDLAEMGNRMNLQRAMMGRDEAEARNAEMLRKRENERRPEGGKMFRDGENSRMMMNNGTSASASSINPNKSRQAPPPPIHDYDRRRRPEKRLSPEHPPTRKNISPSRDSKRKSERYPDERDRQRDRERSRHQDVDREHDRTRDRRDEDRSRDHRHHRGETERSQHHHRKRSEPPSSEPPVPATKAEIENNLKSSVFARISFPEEETSSGKRRKVPSSSSTSVTDPSASASAAAAVGTSVHRHSSRKEIEVADYESSDEDRHFKRKPSRYARSPPVVVSDVSEDKLRYSKRGKGERSRA

SEQ ID NO: 5042 - protein, 221 aa, Arabidopsis thaliana
MAFYSEDDKSEDYLFKIVLIGDSAVGKSNLLARFARDEFYPNSKSTIGVEFQTQKMDINGKEIKAQIWDTAGQERFRAVTSAYYRGAVGALLVYDISRRQTFHSIGRWLNELHTHSDMNVVTILVGNKSDLKDLREVSTAEGKALAEAQGLFFMETSALDSSNVAAAFETVVKEIYNILSRKVMSSQELNKQDPASLSNGKKVVIPSDGQGEFKKGGCCSS

SEQ ID NO: 5043 - protein, 166 aa, Arabidopsis thaliana
MGEPLGLLQVTVIQGKKLVIRDFKSSDPYVIVKLGNESAKTKVINNCLNPVWNEELNFTLKDPAAVLALEVFDKDRFKADDKMGHASLSLQPLISVARLRHVVRVSSGETTLRKVLPDPENCVSRESTISCIDGEVVQSVWLRLCAVESGEIELKIKLIDPPGTNK

SEQ ID NO: 5044 - protein, 415 aa, Arabidopsis thaliana
MAPPVSDDSLQPRDVCVVGVARTPIGDFLGSLSSLTATRLGSIAIQAALKRAHVDPALVEEVFFGNVLTANLGQAPARQAALGAGIPYSVICTTINKVCAAGMKSVMLASQSIQLGLNDIVVAGGMESMSNVPKYLPDARRGSRLGHDTVVDGMMKDGLWDVYNDFGMGVCGEICADQYRITREEQDAYAIQSFERGIAAQNTQLFAWEIVPVEVSTGRGRPSVVIDKDEGLGKFDAAKLKKLRPSFKEDGGSVTAGNASSISDGAAALVLVSGEKALELGLHVIAKIRGYADAAQAPELFTTTPALAIPKAIKRAGLDASQVDYYEINEAFSVVALANQKLLGLDPERLNAHGGAVSLGHPLGCSGARILVTLLGVLRAKKGKYGVASICNGGGGASALVLEFMSEKTIGYSAL

SEQ ID NO: 5045 - protein, 341 aa, Arabidopsis thaliana
MGIVSEEAIDEFQELMDQVEEPLKKTYERVHQGYLRENLGRFLKARDWNVCKAHTMLVECLRWRVDNEIDSILSKPIVPTELYRDVRDSQLIGMSGYTKEGLPVFAIGVGLSTFDKASVHYYVQSHIQINEYRDRVLLPSISKKNGRPITTCVKVLDMTGLKLSALSQIKLVTIISTIDDLNYPEKTNTYYVVNAPYIFSACWKVVKPLLQERTRKKVHVLSGCGRDELLKIMDFTSLPHFCRSGSSGSSHHTQSANCFSINHPFHQQLYNYVKHHYETQGQAEPAKQGSFHVGFPEPEAERCVIAKTIESELHKFENRNGLAVSIDDRKSSHETLANGDL

SEQ ID NO: 5046 - protein, 387 aa, Arabidopsis thaliana
MTVSEAYSPPLFSIAPMMGWTDNHYRTLARLITKHAWLYTEMLAAETIVYQEDNLDSFLAFSPDQHPIVLQIGGRNLENLAKATRLANAYAYDEINFNCGCPSPKVSGRGCFGALLMLDPKFVGEAMSVIAANTNAAVTVKCRIGVDDHDSYNELCDFIHIVSSLSPTKHFIIHSRKALLSGLSPSDNRRIPPLKYEFFFALLRDFPDLKFTINGGINSVVEADAALRSGAHGVMLGRAVYYNPWHILGHVDTVVYGSPSSGITRRQVLEKYKLYGESVLGKYGKGRPNLRDIVRPLINLFHSESGNGQWKRRTDAALLHCTTLQSFLDEVLPAIPDYVLDSSAVKEATGREDLFADVQRLLPPPYEKESFKALERIPTRPVILDEE

SEQ ID NO: 5047 - protein, 379 aa, Arabidopsis thaliana
MEAALLSLQPFPSSATQRRLSPFNLHNTLTRPSSYAPLRAQKSGITEGSDSALEAKVSEQEVGMYQNEVVESQGIRIRRRPPTGPPLHYVGPFEFRLQNEGNTPRNILEEIVWHKDKEVAQMKERKPLYSLKKALDNVPPAKDFIGALRSAHQRTGLPGLIAEVKKASPSRGILREDFNPVEIAQAYEKGGAACLSVLTDDKYFKGSYENLQAIMEAGVKCPLLLKEFIVEAWQIYYGRSKGADAVLLIASVLPDLDIKYMIKICKILGMATLVEVHDEREMDRVLAIEGVELIGINNRNLETFEVDLGITKKLLEGERGELIRQKDILVVGESGLFTPEDIAFVQEAGVKAVLVGESLIKQSDPGKAISTLFGRDVSE

SEQ ID NO: 5048 - protein, 403 aa, Arabidopsis thaliana
MAHTSESVNPRDVCIVGVARTPMGGFLGSLSSLPATKLGSLAIAAALKRANVDPALVQEVVFGNVLSANLGQAPARQAALGAGIPNSVICTTVNKVCASGMKAVMIAAQSIQLGINDVVVAGGMESMSNTPKYLAEARKGSRFGHDSLVDGMLKDGLWDVYNDCGMGSCAELCAEKFQITREQQDDYAVQSFERGIAAQEAGAFTWEIVPVEVSGGRGRPSTIVDKDEGLGKFDAAKLRKLRPSFKENGGTVTAGNASSISDGAAALVLVSGEKALQLGLLVLAKIKGYGDAAQEPEFFTTAPALAIPKAIAHAGLESSQVDYYEINEAFAVVALANQKLLGIAPEKVNVNGGAVSLGHPLGCSGARILITLLGILKKRNGKYGVGGVCNGGGGASALVLELL

SEQ ID NO: 5049 - protein, 163 aa, Arabidopsis thaliana
MASKMSLRYSLFLIFFSLISLQGFAKKTGDVSELQIGVKFKPKTCEVQAHKGDTIKVHYRGKLTDGTVFDSSFERGDPFEFKLGSGQVIKGWDQGLLGACVGEKRKLKIPAKLGYGEQGSPPTIPGGATLIFDTELIAVNEKPAGGEEYGGDEDDEGYGNDEL

SEQ ID NO: 5050 - protein, 354 aa, Arabidopsis thaliana
MSRCFPFPPPGYEKKIRTDEADPLVKDKYKEKKHKKDKEKREGKEKKSKDRSKDKQKERKEKKDKHKDQKDKEKGKEKGKPLEEKKAELLTNAGHRENRVTDTVQNNSNGESKYVQDLARRIRYDEEATGSQSAQRIDHPNQKNVGITEKAFENSPIEETSHRVDDNKRINNQKNFTAAKSSENAVSRVSFGADHKRAEVMGKPMENRDQVRQTESAEKSHRKENVTKSEKPRDQEGVKKTEAKDKDRNKEKKEEKTESINKTRQEKPKLIRGPKLEEREKDSPDLRNCKLPDVSRTSIKNLHTEGNLGKRKDHMTNGFLYGELFSDPILCLVNEECSCHINHRMIYGLVLRSI

SEQ ID NO: 5051 - protein, 203 aa, Arabidopsis thaliana
MNTSEVRVPRGNRRRKAVIDLNAVPVDQEGTSASVRTLTVPITPSQPAPTMIDVDAIEDDVIESSASAFAEAKSKSRNARRRPLMVDVESGGTTRFPANISNKRRRIPSSESVIDCEHASVNDEVNMSSRVSRSKAPAPPPEEPKFTCPICMCPFTEEMSTKCGHIFCKGCIKMAISRQGKCPTCRKKVTAKELIRVFLPTTR

SEQ ID NO: 5052 - protein, 219 aa, Arabidopsis thaliana
MIQLLFLVLFVEGAIAFLLLIKIGPLRELVIKSLDQMKMGKGPATVKTIAGTMSVILFSNLMSIVKIQNKGAKLGTMSPMDQVLWRTHLLEASLLGVVLFLGFIIDRMHHYLRKLINLRSNVGSSKEELEQLQKERTELKEKEEKASKEIKQLQVKLSSITERLKKAETESKEKEKKLETAETHVTALQKQSAELLLEYDRLLEDNQHLQSQILGKTKS

SEQ ID NO: 5053 - protein, 831 aa, Arabidopsis thaliana
MEKTTPPAEELLKKIRELEESQEHLKREMSRLKVSAEMKQRSHSASPQRPVRRNSNDGTPMWRKTGAASFRHASPLRKESHAKVAGGGGEGQSAGKFTDKQYLNILQSMAQAVHVFDLNGQIIFWNSMAEKLYGFSASEALGKDPIDILVDVQDASVAQNITRRCSSGESWTGEFPVKNKAGERFSVVTTMSPSYDDDGCLIGIICITNDSALFQDPRGSPAKTRRGQEGETSFSRVTSSVASKLGLDSKEAVVSKLGLDSQQPIQVAIASKISDLVGNKVKSKMRAGDNNAANLEGGSGDSHQSDQGFFDAAFADRREDAATSGADTPRGDFIQSPFGVFLRSDEKASTKPFRDSSDESDGNSVVPKTLTSKAEEWMVKKGLSWPWKGNEREGLEGRRSHSVWPWVRNEQQKQQAYQSNSNHSVKSESQACESIKASSNEPMGYWSSSVNVNSTSSSSSCGSTSSSVMNKVDMDSDCLDYEILWEDLTIGEQIGQGSCGTVYHGLWFGSDVAVKVFSKQEYSEEIITSFRQEVSLMKRLRHPNVLLFMGAVTSPQRLCIVTEFLPRFGLITLANITLPFVLFELRGQNSDLPYQITFAVEVSSVCCRGTRQNWIGGDVSIWPRIFYLAYYSLDSLIQLLYLVYNMLHIFLTYFFAQARGMNYLHHCTPPIIHRDLKSSNLLVDKNWTVKVADFGLSRIKHETYLTTKTGRGTPQWMAPEVLRNEAADEKSDVYSFGVILWELVTEKIPWESLNAMQVIGAVGFMNQRLEVPKNVDPQWISLMESCWHSEPQDRPSFQEIMEKLRELQRKYTIQFQAARAASIENSALKEK

SEQ ID NO: 5054 - protein, 359 aa, Arabidopsis thaliana
MDNQKGALFPDEVILQILARLPVKSLFRFKSVCKSWYRLPSDKYFTSLFNQLSVKEQLLVAEVSDSSSLICVDNLRGVSELSLDFVRDRVRIRVSSNGLLCCSSIPEKGVYYVCNPSTREYRKLPKSRERPVTRFYPDGEATLVGLACDLSKNKFNVVLAGYHRSFGQRPDGSFICLVFDSESNKWRKFVSVLEECSFTHMSKNQVVFVNGMLHWLMSGLCYILALDVEHDVWRKISLPDEIRIGNGGGNRVYLLESDGFLSVIQLSDVWMKIWKMSEYETETWSVVDSISLRCIKGLVPGIFPICQTGEYVFLATHKQVLVYQRRSKLWKEMFSVKGSSSLPLWFSAHAFRSTIVPCN

SEQ ID NO: 5055 - protein, 311 aa, Arabidopsis thaliana
MGQDRGFGFPTQRLCSLSSLALSHLGKQDLNLVSKTCGDTTDMFSTRGSYQVSTQVSQSYFDGYCGWVHGSSHLQQQFLPPQNQCMKQVPLQVDGVISKAEEQCSQKRFLVFDQSGDQTTLLLASDIRKSFETLKQHACPDMKEELQRSNKDLFVCHGMQGNSEPDLKEDSEELNALLYSEDESGYCSEEDEVTSADHSPSIVVSGREDQKTFLGSYGQPLNAKKRKILETSNESMRDAESSCGSCDNTRISFLKRSKLSSNKIGEEKIFETVSLLRSVVPGEELVDPILVIDRAIDYLKSLKMEAKNREA

SEQ ID NO: 5056 - protein, 346 aa, Arabidopsis thaliana
MDSLTGFRMEPKWQIDPQLLFVGPKIGEGAHAKVYEGKYKNQTVAIKIVHRGETPEEIAKRDSRFLREVEMLSRVQHKNLVKFIGACKEPVMVIVTELLQGGTLRKYLLNLRPACLETRVAIGFALDIARGMECLHSHGIIHRDLKPENLLLTADHKTVKLADFGLAREESLTEMMTAETGTYRWMAPELYSTVTLRLGEKKHYNHKVDAYSFAIVLWELLHNKLPFEGMSNLQAAYAAAFKNVRPSAESLPEELGDIVTSCWNEDPNARPNFTHIIELLLNYLSKVGSPISAIPQRILASKNTLLPPDSPGTSSLMAKLDECGETPKAKSEDKRKGLFFCFNQCY

SEQ ID NO: 5057 - protein, 611 aa, Arabidopsis thaliana
MARNFLLVLLWFIVQVSSSHENGRGDQALSQIDIYAINLAQHHSAFIHVSPLVLGSQGQDTEWVNVVISNPEPSSDDWVGVFSPAKFDSSSCAPTDDKEIAPFICSAPVKYMYAKSSPDYMKTGNAVLKFMLINQRADFSFALFTGGLSNPTLVSVSNHVSFINPKAPVYPRLALGKKWDEMTVTWTSGYNIGEAVPFVEWSRKGTRSRRSPAGTLTFTRNSMCGAPARTVGWRDPGFIHTASLKDLWPNLKYTYRMGHELMNGSIVWSKNFTFKSSPYPGQDSLQRVIIFGDMGKGERDGSNEYNDYQPGSLNTTDQLIKDLKNIDIVFHIGDITYANGYISQWDQFTAQVEPIASTVPYMVASGNHERDWPDSGSFYGGKDSGGECGVPAETMFDFPAENKAKFWYSADYGMFRFCVADTEHDWREGSEQYQFIERCLASVDRRAQPWLIFIAHRVLGYSTNDWYGQEGSFEEPMGRESLQKLWQKYKVDIAFYGHVHNYERTCPIYQNQCMDNEKSHYSGAFKGTIHVVVGGAGSHLSSFSSLKPKWSIFRDYDYGFVKLTAFDHSSLLFEYKKSSNGAVHDSFTIFREYRDVLACVRDSCEPTTLAS

SEQ ID NO: 5058 - protein, 243 aa, Arabidopsis thaliana
MAEKACIKRLQKEYRALCKEPVSHVVARPSPNDILEWHYVLEGSEGTPFAGGFYYGKIKFPPEYPYKPPGITMTTPNGRFVTQKKICLSMSDFHPESWNPMWSVSSILTGLLSFMMDNSPTTGSVNTSVAEKQRLAKSSLAFNCKSVTFRKLFPEYVEKYSQQQVAEEEAATQQTTTSENQDFPQKDNAKVESEKSVGLKKESIQEVGLKERRRNKKEALPGWIVLLLVSIVGVVMALPLLQL

SEQ ID NO: 5059 - protein, 75 aa, Arabidopsis thaliana
MYQGSCCLFILNIISKRYLQPWGYKGNMELNKEDIVPLTPAAQITAPPILQDGSSQQAEDAFGLAVWLGRGLSSV

SEQ ID NO: 5060 - protein, 905 aa, Arabidopsis thaliana
MSRVSFEVSGGYHSDAEAGNSGPMSGGQLPPIYKKPGNSRFTAENSQRTRTAPYVDLTVDVQDDTVSVHSLKMEGGSSVEESPELTLLKRNRLEKKTTVVKRLASVSHELKRLTSVSGGIGGRKPPRPAKLDRTKSAASQALKGLKFISKTDGGAGWSAVEKRFNQITATTGGLLLRTKFGECIGMTSKDFALELFDALARRRNITGEVIDGDQLKEFWEQINDQSFDSRLKTFFDMVDKDADGRLTEDEVREIISLSASANNLSTIQKRADEYAALIMEELDPDNIGYIMLESLETLLLQAATQSVITSTGERKNLSHMMSQRLKPTFNRNPLKRWYRGLRFFLLDNWQRCWVIVLWFIVMAILFTYKYIQYRRSPVYPVMGDCVCMAKGAAETVKLNMALILLPVCRNTITWLRNKTRLGRVVPFDDNLNFHKVIAVGIIVGVTMHAGAHLACDFPRLLHATPEAYRPLRQFFGDEQPKSYWHFVNSVEGITGLVMVLLMAIAFTLATPWFRRGKLNYLPGPLKKLASFNAFWYTHHLFVIVYILLVAHGYYLYLTRDWHNKTTWMYLVVPVVLYACERLIRAFRSSIKAVTIRKVAVYPGNVLAIHLSRPQNFKYKSGQYMFVNCAAVSPFEWHPFSITSAPQDDYLSVHIRVLGDWTRALKGVFSEVCKPPPAGVSGLLRADMLHGANNPDFPKVLIDGPYGAPAQDYKKYEVVLLVGLGIGATPMISIVKDIVNNIKAKEQAQLNRMENGTSEPQRSKKESFRTRRAYFYWVTREQGSFDWFKNIMNEVAERDANRVIEMHNYCTSVYEEGDARSALIHMLQSLNHAKNGVDIVSGTRVMSHFAKPNWRNVYKRIAMDHPNTKVGVFYCGAPALTKELRHLALDFTHKTSTRFSFHKENF

SEQ ID NO: 5061 - protein, 402 aa, Arabidopsis thaliana
MKLLPNPSLTLFPFFTPYTSKHIFRPIKVSVSVQTPPPDFDFRNDIASESRAAIAKTYPELLDLADNGTLILLQKQSFGPVPAWRKEFVEPEAIWLVGTSHISPESASIVERVVRTVKPDNVAVELCRSRKVQFFIQTKFGAGIMYTSSVGGEVDQNLKSGELSLTGTGFLGAVGRSLDLGGQTALALRLLLAVFSSKLSSVADRPFGDEFRAARKASEEVGAQLVLGDRPIEITLQRAWNSLKWGEKFNLVMAVTRVITSSSGISAAELKEQETDENSGSLQLYERLSFSYPALLMPLIHERDTYLAWSLKRSKAVNGCKTVVGVIGKGHMNGVIYALVSDSGDLRFRDLVGRGDSYNGGTGTTSNGWIQKVLKSFVRDTIIGFLLWELYEQYLMMNQNLS

SEQ ID NO: 5062 - protein, 357 aa, Arabidopsis thaliana
MKPVFCGNFEYDARESDLERLFRKYGKVERVDMKAGFAFVYMEDERDAEDAIRALDRFEYGRTGRRLRVEWTKNDRGGAGRSGGSRRSSSGLRPSKTLFVINFDAQNTRTRDLERHFEPYGKIVNVRIRRNFAFIQYEAQEDATRALDATNSSKLMDKVISVEYAVKDDDSRGNGYSPERRRDRSPDRRRRSPSPYRRERGSPDYGRGASPVAHKRERTSPDYGRGRRSPSPYKRARLSPDYKRDDRRRERVASPENGAVRNRSPRKGRGESRSPPPYEKRRESRSPPPYEKRRESRSPPPYEKRRERSRSRSKSSPENGQVESPGQIMEVEAGRGYDGADSPIRESSPSRSPPAEE

SEQ ID NO: 5063 - protein, 828 aa, Arabidopsis thaliana
MTSNKGAIIPPELPWKPVAKGSRSSTRRGKKLVKRVAASDIESEDKSSTHTLVAGESKRPKLGVSVLGQHFVERVEHVPIKKRIFVVSSPSPSPSSSKRSSAQREGSEHKAQINHVLPVSRLNPNLVSDVRDEKPDYSVHDFSGIKILADAACSTDVSNDFAPAVDRLPAEEFAVQLQDTSTISTHVEGNDSSAGTADVSHTAVDSGDQSGQGKSNIVAPQKHPLTNLCNELADEQSVEHSRVTSGGIIAPKKTCIALSNESSTERPKDNVEASESEPLAPDSGAVTVSEKLSADEPTEKNNEGLKDVKFLWDLNIPCDVEDEASRRDEEGEITESIAPKGSEPFDGSKHSMDGVIASDEHTKFSSPSKPNDEAAATNDKDCQSGYDSQFEDGELREPYPWEENEEVEQLDYGSEPEDERFYSMGSEKGILTDENFSHVKCESGDALRVGQANEGSDIEKQAVVNMSDSHPKKGSSSPSRSFGSKPYKEVPSHDAIQRRRPDTYEEVSTGPDRFARRDDRSGMRMRNRSPQRGYFSGWDSKRRFSPPNYKDGSYGSGRPWHKRMADDRGMMNGFDESGSGQGPGPEPEPEGYVRRQFSNGGYRGRFKRFPDGGDRKFRGPYTDTNQFSGRMHNRMSGNRRERGGSPVVRRLHHPQSESRSRSRSPVLWNGRNRSPPPPPGGFRADERMTERVRLPFQKRFPADQEMGYMSPPRNRMSSPRFFEGRNNGAGENYNSFRERKFRPGQRFYVGNSMRRPNSDNNNLRPFIPNRRFDNPEESTGGNRFEMTQQRRTRRSETTEDGGDVIRRFKFNEEQQSVVVANDNNNKES

SEQ ID NO: 5064 - protein, 360 aa, Arabidopsis thaliana
MDSSSSMCKQAQPIVRKARKKKVKGVVDPIKQAEKKNRRLEKAIATSAAIRAELEKKKQMKKEGQLEAADEEDSADAAKKKQERDELERIKQAENKKNRLEKSIATSAAIMAELEKKKLRKLEEQKRLAEEGAAIAEKKKRRLEKAIATTAAIRAELEKKKQMKKEGQLDAAVEEDSAYAAKKKQEREELERIKQAERKKRRIEKSIATSAAIRAELEKKKLRKLEEQRRLDEEGAAIAEAVALHVLLGEDCDDSYRNTLNQETGFKPWDYTTKINLFSGGINRFFPHQRCSSYAVHDNNRTRDSNWSSVSYEPFARGWDNNNNNMGISADLFDTQAVSSLQISENTDVDAIVFNGMFRR

SEQ ID NO: 5065 - protein, 589 aa, Arabidopsis thaliana
MEIPPSPPPETAAYTLTTSSISYTIPKTSLSLLRFPATEPPSFILRNITLTAHPTEILAVVGPSGAGKSTLLDILASKTSPTSGSILLNSIPINPSSYRKISSYVPQHDSFFPLLTVSETFSFAACLLLPNPSIVSETVTSLLSELNLTHLSHTRLAQGLSGGERRRVSIGLSLLHDPCFLLLDEPTSGLDSKSAFDVIHILKSIAVSRQRTVILSIHQPSFKILSIIDRLLLLSKGTVVYHGRLDSLEGFLLFKGFTVPPQLNSLEYAMEILQELRESDGNTDATALPSIENRKQREKQSIVRYRKSRITEISLLARRFWKIIYRTRQLLLTNALEALVVGLVLGTIYINIGIGKAGIEKRFGMFAFTLTFLLSSTTETLPIFINERPILLRETSSGIYRLSSHILANTLVFLPYLFVISIIYSVSVYFLIGLCPTWQAFGYFVLVIWIILLMANSFVLFLSSLAPNYITGTSLVTILLAAFFLFSGYFISKESLPKYWLFMYFFSMYKYALDALLINEYSCLASKCLVWLEEAQTKICMVTGGDVLKKKGLHEKQRWFNVYVLLGFFVLYRVLCFLALLRRVSGSKR

SEQ ID NO: 5066 - protein, 385 aa, Arabidopsis thaliana
MDIPEKMEMDQLNQGSSSSLTNKRKRGRPRRDESQTQQPVNPPVDENLIGRVVSGVVEGSFEAGYFLNVKVADTEKQLKGVVFLPQKVTPLTPATDLFPQAKMYARNDIPIPSSYQQTPLQEKKNAGNQTDDIGSEPQTDALIADKNQSATCTTSLPDDHPMRDAGVGSVAMGERNDPIDTLMKDVAGSSAEGKVIEPAGQTLSLMPQFGSDGVPKEDHTVLRSEACAASKTAVTVTITSPKDSIAKGSTTLVDFFSAPETSRTQATGSSSTLNLELFQNQTKRSGTEDEKTPADAEPRGMEEKPASTVEDVPEELQLELGNKNMSASGIATEANPDQSVSSKSGFLANAFEGKEEIAKEPEDSNAAASESGFPVATTQVDANDS

SEQ ID NO: 5067 - protein, 429 aa, Arabidopsis thaliana
MSSVSSQPQFRYTQPPSKVLHLRNLPWECTEEELIELGKPFGTVVNTKCNVGANRNQAFIEFEDLNQAIQMISYYASSSEPAQVRGKTVYLQYSNRQEIVNNKTTADVVGNVLLVTIEGDDARMVSIDVLHLVFSAFGFVHKITTFEKTAGYQALVQFTDAETATAAKLALDGRSIPRYLLAETVGQCSLKITYSAHTDLTVKFQSHRSRDYTNPYLPVAPSAIDSTGQVAVGVDGKKMEPESNVLLASIENMQYAVTLDVLHMVFAAFGEVQKIAMFDKNGGVQALIQYSDVQTAVVAKEALEGHCIYDGGFCKLHITYSRHTDLSIKVNNDRSRDYTMPNPPVPMPQQPVQNPYAGNPQQYHAAGGSHHQQQQQPQGGWVQPGGQGSMGMGGGGHNHYMAPPSSSSMHQGPGGHMPPQHYGGPGPMH

SEQ ID NO: 5068 - protein, 63 aa, Arabidopsis thaliana
MASLKFPLEILAVFVIISVILLPIAQSHSSSPAPAPTSDGTSIDQGIAYVLMMVALALTYFIH

SEQ ID NO: 5069 - protein, 675 aa, Arabidopsis thaliana
MRSMMMEREGRNEIEREVIDDLEETQNEGDDFKSIPPWKEQITFRGIVASLIIGIIYSVIVMKLNLTTGLVPNLNVSAALLAFVFLRSWTKLLTKAGIVTKPFTKQENTVVQTCAVACYSIAVGGGFGSYLLGLNRITYEQSGGTHTDGNYPEGTKEPGIGWMTAFLFFTCFVGLLALVPLRKIMIIDYKLTYPSGTATAVLINGFHTPKGNKMAKKQVFGFVKYFSFSFIWAFFQWFFSGGTECGFIQFPTFGLEALKNTFYFDFSMTYVGAGMICPHIVNISLLFGAVLSWGIMWPLIKGLKGDWFPSTLPENSMKSLNGYKVFISISLILGDGLYQFIKILFKTGINMYVKLNNRNSGKSNSEKDKQSIADLKRDEIFVRDSIPLWVAAVGYAAFSVVSIIAIPIMFPELKWYFIVVAYMLAPSLGFSNAYGAGLTDMNMAYNYGKVALFILAAMAGKQNGVVAGLVGCGLIKSIVSISSDLMHDFKTGHLTLTSPRSMLVSQAIGTAIGCVVAPLTFFLFYKAFDVGNQEGEYKAPYALVYRNMAILGVEGFSALPQHCLQLCYGFFAFAVAANLVRDRLPDKIGNWVPLPMAMAVPFLVGGYFAIDMCVGSLIVFAWNMRDRVKAGLMVPAVASGLICGDGLWILPSSVLALAGVRPPICMGFMPSKYSS

SEQ ID NO: 5070 - protein, 142 aa, Arabidopsis thaliana
MGFEENQKQSPKQSPNHIKHMVFKFHFHVPHLHILPHHHHHHHHDVPKGCVAIMVGHEDDEEGLHRFVVPLVFLSHPLFLDLLKEAEKEYGFKHDGPITIPCGVDEFKHVQEVIDEETHRRHSHGGHGHNNHNHHNNHLRCF

SEQ ID NO: 5071 - protein, 682 aa, Arabidopsis thaliana
METAASSVATTRGGSLQNPSPTAPSRKEWRAVSDSQDTTDYVDLEQLKLNRTDERTIYENGREQDGYSNSEMLQQQILNVSRKKGELQQLEIELRAQMIARHEIMEIQSNYESQFTEYANAAARMQEQLHENERSIREAERKLEEKDRELHAIKLDNEAAWAKEGILREQNKELATFRRERDHSEAERSQNIHKISELQEHIQEKESQLSELQEQNRIAQETILYKDEQLREAQGWIARAQEIDALQSSTNHSLQAELRERTEQYNQLWHGCQRQFAEMERLHVHTVQQLQQELANVREAGGSKTNSGGASQTIQNSGNQFDAHGNSAESANISVHSNGKSADNISSFTSTDDKATQNNRVDGISASNLATHGFLQAGQMTPLHSFVMHQQEISQLVQPQVPSQHIEQSVLLQQKAQAVPDSSQMPMQNHVHPSQGVHGLVQSFGQGYGDIQTSQVAQYGTTTTPSSVNEQAVESGNGDYNGSNQSENNFQDISSQFRDALRLDSHSQNQKPEELNGQVSPDEHSGAKSIVPETLVSSGKPERNSECALLDERSLLTCILRTIPAGGRIRISSTLPNRLGKMLAPLHWHDYRKKYGKLDDFVASHLELFSIEDDYIQVRDGAQKMVAASAAAAKVAAAAAASSSPNSIYVAMTPMAQSQGLKKNDNRVRQSSDFMVKQQRKL

SEQ ID NO: 5072 - protein, 573 aa, Arabidopsis thaliana
MGEGEENGNEADSNERSLALSPTWSVAIVLTVFVVVSLIVERSIYRLSTWLRKTKRKPMFAALEKMKEELMLLGFISLLLTATSSTIANICVPSSFYNDRFLPCTRSEIQEELESGSTVKRNLLTKSLFFNIFRRRLDVIKRTTCSEGHEPFVSYEGLEQLHRFIFIMAVTHVTYSCLTMLLAIVKIHSWRIWEDVARLDRHDCLTAVAREKIFRRQTTFVQYHTSAPLAKNRILIWVTCFFRQFGRSVDRSDYLTLRKGFIVNHHLTLKYDFHSYMIRSMEEEFQRIVGVSGPLWGFVVAFMLFNIKGSNLYFWIAIIPVTLVLLVGAKLQHVIATLALENAGLTEYPSGVKLRPRDELFWFNKPELLLSLIHFILFQNSFELASFFWFWWQFGYSSCFLKNHYLVYFRLLLGFAGQFLCSYSTLPLYALVTQMGTNYKAALIPQRIRETIRGWGKATRRKRRHGLYGDDSTVRTETSTIASLEEYDHQVLDVTETSFEQQRKQQEQGTTELELQPIQPRNDCVPNDTSSRVGTPLLRPWLSISSPTTTIELRSEPMETLSRSSSLPSEKRV

SEQ ID NO: 5073 - protein, 66 aa, Arabidopsis thaliana
MKFLFQCPCCSCFCFMKPKPGKPKAVGDTKPKEEKKKEVKKEEIKKEEKKEEKKEEKKETKAEKAE

SEQ ID NO: 5074 - protein, 436 aa, Arabidopsis thaliana
MKGRISKIGSYAISSSIRDQHQQPCISCTTFNILAPIYKRLSHKDQSLRESDNRAYWLGRNHRIIDWLLYERSSIICLQEFWVGNEELVNLYEKRLGDAGYLSYKLGRTNNRGDGLLTAVHKDYFRVVNSRDLLFNDCGDRVAQLLHVELVPPYSQYDAHQEVLIVNTHLLFPHDSTLSIVRLQQVYKILQYVESYQKEVNLSPMPIILCGDWNGSKRGHVYKFLRSQGFVSSYDTAHRYTDSDAHKWVSHRNHRGNICAVDFIWLLNPNRYRKLLKTSWSEAVFGMFRYLLRRASLTAEDAFAFLKTDNDGDHITFMGFCETLRQLNLTGHCNGLTTKEIKDLWTQADIDGNGLLDYKEFQQRIWNQTWSEQRDAEDGEAKGNQEQTVGFSVKNAVLFPPEVEKGMWPENYSLSDHARLTVVFSPIRMPCSQLVS

SEQ ID NO: 5075 - protein, 900 aa, Arabidopsis thaliana
MVGMIRGGMGDQNWSRLVFWLILFSGLLVITLEENPEKDEIFLSQFMAPSTGQVNEHMEETSWAQRCWQDSDCVKEAVAEFNLCFPGSKDSRELFGLNHTNLKQTLLDCIQEKGKLNGHNPKYLELLSSMLDIPRRNLATKPGSSPSPSPSRPPKRSRGPPRPPTRPKSPPPRKSSFPPSRSPPPPPAKKNASKNSTSAPVSPAKKKEDHEKTIIIAVVVTAVSTFLLAALFFLCCSRVCGNGSGGRKNDERPLLSLSSSDYSVGSSINYGGSVKGDKQGHQSFNIYSNQGKMSSFDGSNSDTSDSLEERLSHEGLRNNSITNHGLPPLKPPPGRTASVLSGKSFSGKVEPLPPEPPKFLKVSSKKASAPPPPVPAPQMPSSAGPPRPPPPAPPPGSGGPKPPPPPGPKGPRPPPPMSLGPKAPRPPSGPADALDDDAPKTKLKPFFWDKVQANPEHSMVWNDIRSGSFQFNEEMIESLFGYAAADKNKNDKKGSSGQAALPQFVQILEPKKGQNLSILLRALNATTEEVCDALREGNELPVEFIQTLLKMAPTPEEELKLRLYCGEIAQLGSAERFLKAVVDIPFAFKRLEALLFMCTLHEEMAFVKESFQKLEVACKELRGSRLFLKLLEAVLKTGNRMNDGTFRGGAQAFKLDTLLKLADVKGTDGKTTLLHFVVQEIIRTEGVRAARTIRESQSFSSVKTEDLLVEETSEESEENYRNLGLEKVSGLSSELEHVKKSANIDADGLTGTVLKMGHALSKARDFVNSEMKSSGEESGFREALEDFIQNAEGSIMSILEEEKRIMALVKSTGDYFHGKAGKDEGLRLFVIVRDFLIILDKSCKEVREARGRPVRMARKQGSTASASSETPRQTPSLDPRQKLFPAITERRVDQSSSDSD

SEQ ID NO: 5076 - protein, 754 aa, Arabidopsis thaliana
MVGAMANNGRIRSAFPVTNGSKDLTPNSAPASTTGSEYGPVEFTREDVETLLNERIKYKSKFNYKERCENMMDYIKRLRLCIRWFQELELDYAFEQEKLKNALELNEKHCVDMEVSLKNKEEELNMIIEELRKNFESVQVQLAREQTEKLAANDSLGKEKEARLSVEKAQAGLTEELGKAQGDLQTANQRIQSVNDMYKLLQEYNSSLQLYNSKLQGDLDEAHETIKRGEKERTAIIENIGNLKGQFSALQEQLAASKASQEDIMKQKGELVNEIASLKVELQQVKDDRDRHLVEVKTLQTEATKYNDFKDAITELETTCSSQSTQIRQLQDRLVNSERRLQVSDLSTFEKMNEYEDQKQSIIDLKSRVEEAELKLVEGEKLRKKLHNTILELKGNIRVFCRVRPLLPGENNGDEGKTISYPTSLEALGRGIDLMQNAQKHAFTFDKVFAPTASQEDVFTEISQLVQSALDGYKVCIFAYGQTGSGKTYTMMGRPGNVEEKGLIPRCLEQIFETRQSLRSQGWKYELQVSMLEIYNETIRDLLSTNKEAVRTDSGVSPQKHAIKHDASGNTHVAELTILDVKSSREVSFLLDHAARNRSVGKTQMNEQSSRSHFVFTLRISGVNESTEQQVQGVLNLIDLAGSERLSKSGSTGDRLKETQAINKSLSSLGDVIFALAKKEDHVPFRNSKLTYLLQPCLGGDAKTLMFVNIAPESSSTGESLCSLRFAARVNACEIGTPRRQTNIKPLENRLSLG

SEQ ID NO: 5077 - protein, 763 aa, Arabidopsis thaliana
MKKNGDGSSPKSPDGVVSRSARSSFRALSNCLKVISSGASTVARSAVSAASSAVESHHDQVLWAGFDNLQKEDGDTRRVLLLAFKSGFQVWDVEDTENVHVIVSAHDGQAFFMQMLLNPINSGVLDDRFYKSRPLLAVCGDYSSKKISSDNPGSETVATPTNVYVYSLKSQSYVHTLKFRATIYSVRCCSRIVAVLQAAQIDCFDAATLEMDYRIVTNSIVCGSLGVGYGPLAVGPRWIAYSGSRIATSSSAIFTSEIVSLSTSSPSVAQFARDSSKQLASGIANLGDKGYRSLTKYCSEVLPNPYIPGLKGIGVGNEKVADAESIGMVIVKDITNKSVITQFKAHKSPISALCFDQSGLLLVTASIQGHNINVFRIMPTISTSRAVKTTTFAHLFRLQRGFTNAVIQDICFSKDSNLIVVGSSRGTSHLFEINPEKEGDAPVPMSAISRIRSGNSSGWIGTVSGAASAAAGMVAGSVPGTVTSTFCYCDEKSNNNYYGSVADMCSKTNLLVFAPSGCMTQYALREHQVGVGHETAAMTGFDSESGLETEGKLAVDPIRRWSMIQNQSRRETHDPHSDIYGGGTSVDSKSKVFPEVVRKQSVEEAWKVSKKGTTRVVDKRHLYIYEAEQQQTHLPTQLPLWARRKFRFQELVLNRGEEISGGGGREMEIEGIQTRTIEARTRDLVPVWGYLQSPRSQQVINESIQSPSTTTQDDKVATLEGHGTETDLGAVHSEEQTQSEPVDKEGIAEEKNHSEDEDEEQVD

SEQ ID NO: 5078 - protein, 113 aa, Arabidopsis thaliana
MSELDSQVPTAFDPFADANVEDSGAGTKEYVHIRVQQRNGRKSLTTVQGLKKEYSYTKILKDLKKEFCCNGTVVQDSELGQVIQLQGDQRKNVSTFLVQAGLVKKDNIKIHGF

SEQ ID NO: 5079 - protein, 431 aa, Arabidopsis thaliana
MLLKIKRVPTVVSNYQKDETVEEGGCGRNCLSKCCINGARLPLYTCKNLDKSVGENTESPVTFLESLVIGEWEDRFQRGLFRYDVTACETKVIPGKYGFIAQLNEGRHLKKRPTEFRVDKVLQPFDGNKFNFTKVGQEELLFQFKASTNDDDSEIQFLASMPLDADNSPSVVAINVSPIEYGHVLLIPRVLDCLPQRIDHKSLLLALQMAAEADNPYFRLGYNSLGAFATINHLHFQAYYLAMQFPIEKASSLKITTTNNGVKISKLLNYPVRGLLVEGGNTIKDLADTVSDASVCLQNNNIPFNILISDSGKRIFLLPQCYAEKQALGEVSSTLLDTQVNPAVWEMSGHMVLKRKEDYEGASEEKAWRLLAEVSLSEERFREVNTMIFDAIGFSSHEEEEEEELEEQNSMNGGSFTIVHCPSVKEEAVSN

SEQ ID NO: 5080 - protein, 663 aa, Arabidopsis thaliana
MCENDHHFVEWKEHFVSQERGNRVVHYFLKDSAGESILAVIGTERSVRHMFYVVSEEFVRIHGPENSIHSGFKWRSRREVVDWLTSMLSKQSTQGNWSKSPKCESGESNGSPEFPSNGFTAQRAQASEEVRLPINLIIHSWEIMWSGAPWMCGKQLKHYPSFCRNGTTIGVQSFVFVLSKGEDRYVAYLEDMYEDKRGLKKVKVRWFHYTKEVKGAVALKNPNPKEVFITPHSQVISAECVDGPATVLTREHYEECVASFPNSLLARVHMCYRQLRNSKVKPFDLSKLRGYLDQPIMSCLSSMEAGPVDCAMNIEEDEEWSEGENVMVGAERSMKKRARIMSDHLLTTYESSCKRLKLNASGKRFPSPTNVQKHPCYNGVVKTDAKIEFLCQDSGIRGCWFRCTVLDVSRKQVKLQYDDIEDEDGYGNLEEWVPAFKSAMPDKLGIRLSNRPTIRPAPRDVKTAYFDLTIGEAVDAWWNDGWWEGVVIATGKPDTEDLKIYIPGENLCLTVLRKDIRISRDWVGDSWVDIDPKPEILAIVSSDSSSESKLSMLSTLSKDTKAKPSAMPNIVEEAEPEGEKAYNSLLGEQNKEHKDVVVKEDDENKLSKEEDKEVGSNETKTYVNHENTVEDHKEDDVTLNDEKARKSESVFTLSKTTTTLVTT

SEQ ID NO: 5081 - protein, 130 aa, Arabidopsis thaliana
MSFRFGELDDYMFPFDWRDKGRPLPKFGEWDVNDPASAEGFTVIFNKARDEKKTGGKPGSPGKSSEGHVKSGGGDPSKPQPVKKMALLHASSSCGLLTDTKMDLLAAKKKVTVLTHLKAMVLFMFYCRLS

SEQ ID NO: 5082 - protein, 498 aa, Arabidopsis thaliana
MMASKTPEGSLTNSSQSMSINTLADQVSSSLSFADPSSDGKTGNSKINEQGESGKSSTCRPSTSSDISDESTCSSFSSSINKPHKANDVRWEAIQAVRTKHGGLGLNHFRLLKRLGCGDIGTVHLAELNGTRCYFAMKVMDKTALASRKKLLRAQTEREILQCLDHPFLPTLYSHFETEKFSCLVMEFCPGGDLHTLRQRQPGKRFTEQAAKFYVAEVLLAMEYLHMLGIIYRDLKPENVLVRDDGHVMLSDFDLSLRCTVSLSIVRSANVGSEGLSKNSVSCSQQPACIQQPSCISMAPTSCFGPRFFSSKSKKDKKPKTENGNHQVTPLPELVAEPTGARSMSFVGTHEYLAPEIIKGEGHGSAVDWWTFGIFLYELLFGKTPFKGSGNRATLFNVVGQPLRFPESPVVSFAARDLIRSLLVKEPQHRLAYKRGATEIKQHPFFEGVNWALVRCASPPEIPKPVDLEALNPTPTVPAAASSSVRSDQSNYLEFDFF

SEQ ID NO: 5083 - protein, 343 aa, Arabidopsis thaliana
MNTRYSNQPELSSSNITITISSSALLSSSPRGDNSHVAAANGQERSPSSFYIRLAMKVSRARWFIFLRRVFHYQNGSRSDLGSNPFNSSTWMMSELIALLVQLTVITFTLAISKEERPIWPVRLWITGYDVGCLLNLMLLYGRYRQLDINQGNGFVLGDVEQQQRGREETRSSHLMNKCRTSLELFFAIWFVIGNVWVFDSRFGSFHHAPKLHVLCVSLLAWNAICYSFPFLLFLFLCCLVPLISSLLGYNMNMGSSDRAASDDQISSLPSWKFKRIDDSASDSDSDSATVTDDPECCICLAKYKDKEEVRKLPCSHKFHSKCVDQWLRIISCCPLCKQDLPR

SEQ ID NO: 5084 - protein, 811 aa, Arabidopsis thaliana
MFLSSTDQRSPSNNNPSSSSSFLHLTNSCDELGQSHLSTFSIRDYAFSYRTKNIKKSWPFSSTSLQLCLNHGLTDPLPPIQPPEVKKPNITHVEAVSHKRKSEKLGSYQILVETTKQGFENGLLASGSKSKIQVAMVNKNPRKKCGLIVKPGACVDSGGKEDHSSLFSASDSMALRTCPICKTFSSASNTTLNAHIDQCLSVDSGQQPIRKPNRPKTKPRLKVKTMTDIYASAKEGTLEDLDKRNGTKWAMISSYSNRVVSDDKPEVSNKVKKRSVSRARIDEDAAGIGPVYIDAKGQKLRILSKFNEKASDPSRREHEEVCEKKSSSEGKGGKSFRKKLWGEKHYKHRKLVPQNRKLTVRKSNASEIPEYRRGYSKEGKDFERSETSGPGQGRIFNQRMLTKRSLSRHGKKNGTDICESENWNSLSEDPLVLRSPSHVSTDLSETVSSPLNSIGSWRVCGESQVSGKSWALSRNRSIESDLFVANPLRCLTPVARGVMKFKKARMDFSENEDEDIGKWESEMTQERELSDYDGWDDDDGETDKVALSSNPSFSGEDNDYESYEETGDNKGGDDMLDKTKDADVEFESMVYEKTGCETAEQESSFMEVDPIPIPGPPGSFLPSPWDMMGTDAVEHHGNSSVITSQVHSSQDQFDLTDRNSSESPVSAISNFAAPETQTLSLHNIITTDKRPSRFRDNDQSCCCQRKEKALEDTTFCQPPPPQMIQQDLDFLSKSVPAVPSTPNPVLRLMGKDLMVINQREEPSHNESSPKPTSQFLDLSKTQQASPSVNLLHPPYSGNGYFDTNTSFYNIP

SEQ ID NO: 5085 - protein, 669 aa, Arabidopsis thaliana
MKQKGFKERGVVVGKKVMVAVRASKEIPKAALLWTLTHVVQPGDRIRLLVVVPSNYTSKKIWGFSRFTSDCASGYGRFLAGTNSDRKDDIHESCSQMMFQLHNVYDAEKINVRIKIVFASLDGVIAAEAKKSNSNWVILDRGLKYEKKCCIEQLECNLVVIKKSQPKVLRLNLVKNADTEHPEAISRLASKSVESRRSSRTGKKLREPFVTPASSPDQEVSSHTDIGTSSISSSDAGASPFLASRVFEGLKKENLWVNDGSKSFFESDSDSDGEKWSPLSMASSSSHPVTTADLLSPSGDLSKAHTETPRKSRFAVLRLALSRKEPEAGKEIRKPDSCLNKSVREVVSLSRKPAPGPPPLCTICQHKAPKFGNPPRWFTYSELETATKGFSKGSFLAEGGFGSVHLGTLPDGQIIAVKQYKIASTQGDREFCSEVEVLSCAQHRNVVMLIGLCVEDGKRLLVYEYICNGSLHSHLYGMGREPLGWSARQKIAVGAARGLRYLHEECRVGCIVHRDMRPNNILLTHDFEPLVGDFGLARWQPEGDKGVETRVIGTFGYLAPEYAQSGQITEKADVYSFGVVLVELITGRKAMDIKRPKGQQCLTEWARPLLQKQAINELLDPRLMNCYCEQEVYCMALCAYLCIRRDPNSRPRMSQVLRMLEGDVVMNPI

SEQ ID NO: 5086 - protein, 596 aa, Arabidopsis thaliana
MAPRILLCGDPLGRLNQLFKRVQSVSKSAGPFDALICVGQFFPDSPEILDEFLDYVEGRAQVPIPTYFTGDYGVVAPKILSTTSKKAENQGFKMDGLEVCHNLFWLRGSGKFSLHGLSVAYLSGRQSSESQFGKYSQDDVDALRALAEEPGGVDLFLTNEWPAGVTNRAAVSDIPVGISDSSCSDSTVSELVMEVKPRYHIAGSMGVFYAREPYLNAESTHVTRFIGLAQVGNKNKQKFLHALSPTPTSTMSPAELSAKPPKTTLWPYNLQDGAAESKKRPNDSDSDSQYWRYDVPKRQKSGSQGEKLCFKFVCSGSCPRGEDCHFQHNAEAREQCRRGVCLDLIIKGKCEKGPECSYKHEFQDESSIQRKPRSENANRSKECWFCLSSPSVESHLIVSVGESFYCALPKGSLVEDHILIIPIEHLPNTLVLSPEVESELSRYQNGLRNCYKSQGNDAVFFELVSKRVSHANLQVVPVPSSRARLLPNIFSLAAEKLGFKLVTKKFNDSTDGRKYLQKEYNAALGLFYVELPDGTVLSHTLEENEVFPAQFGREVLAGLLKIPDRADWRNCKISQEEEAKLAEDFKKQFQEFDPCQ

SEQ ID NO: 5087 - protein, 435 aa, Arabidopsis thaliana
MEPRVGNKYRLGRKIGSGSFGEIYLGTHIQTNEEVAIKLENVKTKHPQLLYESKLYRILQGGTGVPNIKWFGVEGDYNTLVMDLLGPSLEDLFNFCSRKLSLKSVLMLADQMINRVEYFHSKSFLHRDLKPDNFLMGLGRRANQVHIIDFGLAKKYRDNTTHQHIPYRENKNLTGTARYASMNTHLGIEQSRRDDLESLGYILMYFLKGSLPWQGLKAGTKKQKYERISEKKVSTSIESLCRGYPSEFASYFHYCRSLRFDDKPDYGYLKRIFRDLFIREGFQFDYVFDWTILKYQQSQLTAPPSRGLVSPAVGTSAGLPPGLTSIDRYGGEEEGGRPPMDSSRRRMSGALENSGNLSSRGPMMPSSSLFAQSAGSSRRVTSEELQRCRTGAGLRNSPVVTTPEGKRSSSTRKHYDSAIKGIETLQVSDERFHHH

SEQ ID NO: 5088 - protein, 423 aa, Arabidopsis thaliana
MDEVSPAVAVPFRPFTDPHAGLRGYCNGESRVTLPESSCSGDGAMKDSSFEINTRQDSLTSSSSAMAGVDISAGDEINGSDEFDPRSMNQSEKKVLSRTESRSLFEFKCVPLYGVTSICGRRPEMEDSVSTIPRFLQVSSSSLLDGRVTNGFNPHLSAHFFGVYDGHGGSQVANYCRERMHLALTEEIVKEKPEFCDGDTWQEKWKKALFNSFMRVDSEIETVAHAPETVGSTSVVAVVFPTHIFVANCGDSRAVLCRGKTPLALSVDHKPDRDDEAARIEAAGGKVIRWNGARVFGVLAMSRSIGDRYLKPSVIPDPEVTSVRRVKEDDCLILASDGLWDVMTNEEVCDLARKRILLWHKKNAMAGEALLPAEKRGEGKDPAAMSAAEYLSKMALQKGSKDNISVVVVDLKGIRKFKSKSLN

SEQ ID NO: 5089 - protein, 435 aa, Arabidopsis thaliana
MSACLSSGGGGAAAYSFELEKVKSPPPSSSTTTTRATSPSSTISESSNSPLAISTRKPRTQRKRPNQTYNEAATLLSTAYPNIFSSNLSSKQKTHSSSNSHFYGPLLSDNDDASDLLLPYESIEEPDFLFHPTIQTKTEFFSDQKEVNSGGDCYGGEIEKFDFSDEFDAESILDEDIEEGIDSIMGTVVESNSNSGIYESRVPGMINRGGRSSSNRIGKLEQMMMINSWNRSSNGFNFPLGLGLRSALRENDDTKLWKIHTVDFEQISPRIQTVKTETAISTVDEEKSDGKKVVISGEKSNKKKKKKKMTVTTTLITESKSLEDTEETSLKRTGPLLKLDYDGVLEAWSDKTSPFPDEIQGSEAVDVNARLAQIDLFGDSGMREASVLRYKEKRRTRLFSKKIRYQVRKLNADQRPRMKGRFVRRPNESTPSGQR

SEQ ID NO: 5090 - protein, 120 aa, Arabidopsis thaliana
MGVFSFVCKSKGGEWTAKQHEGDLEASASSTYDLQRKLVQTALSADSSGGVQSSFSLVSPTSAVFVVVIGGGGGGGFAAGGGAAAGGGGGGEAAAATKEEEKKKEESEEEEGDFGFDLFG

SEQ ID NO: 5091 - protein, 256 aa, Arabidopsis thaliana
MCFITHQMVMKLYDYVSGMGTKIVERITTNQSGLKSVDHSGFIRFVVNGRQESSKETLTDEEEEGVFILRSMDRFLEKQNAESIRHTMQAQEDIFKQQVRELHRVYNTQKMMMTQLKHRSQYWTVNNKDQPGSRERTGSCSGIDLENVVRATQTTTDHIEESELELTLSIGLSSSSTTMTTTTNKDMDYSSTTSMRSSSDNCNNQSNNNLYNNSNNNQESSGPNTPMSSSSTTSLDREKKRPHWLFQGLSINRTSS

SEQ ID NO: 5092 - protein, 284 aa, Arabidopsis thaliana
MDRSTFILSLLFTLTVSTTTLFSPVFAGTFDTEFDITWGDGRGKVLNNGELLTLSLDRASGSGFQTKKEYLFGKIDMQLKLVPGNSAGTVTAYYLKSKGDTWDEIDFEFLGNLTGDPYTMHTNVYTQGKGDREQQFHLWFDPTADFHTYSVLWNPHHIVFMVDDIPVREFKNLQHMGIQYPKLQPMRLYSSLWNADQWATRGGLVKTDWSKAPFTASYRNFRADACVSSGGRSSCPAGSPRWFSQRLDLTAEDKMRVVQRKYMIYNYCTDTKRFPQGFPKECRH

SEQ ID NO: 5093 - protein, 143 aa, Arabidopsis thaliana
MSDVSLSHQVTVFFILSEILHFSQVIGTKTKICIVMEYVSGGQLSDRLGRQKMKESDARKLFQQLIDAVDYCHNRGVYHRDLKPQNLLLDSKGNLQVSDFGLSAVPKSGDMLSTACGSPCYIAPEVTLLVILRSMRPYAFCFV

SEQ ID NO: 5094 - protein, 1054 aa, Arabidopsis thaliana
MDSGSVNSSVTSLVSSLNDEPHRVKFLCSFLGSILPRPQDGKLRYVGGETRIVSVNRDIRYEELMSKMRELYDGAAVLKYQQPDEDLDALVSVVNDDDVTNMMEEYDKLGSGDGFTRLRIFLFSTPEQDGSLHYVERDDQRESERRYVDALNNLIEGTDFRKLQQYPDSPRFNLVDDFSMVEPMLNQLSIETGGGSQRGNEIPTAQYSNLHQLRIPRVGSGQMLAQRYGEVEGTWSPFYSPRHHGHHDPRTFQEFPSSPSSARYRMPYGEIPDKGLDRMPEEYVRPQASHHPFYEHQAHIPDSVVWVPAGAMPPESKGGFPGNVLHGGPGGYEGGNGCENCRVPYHRNHQLLEQSNIGNNGFPPVHCAHCPPNRESFLLNTDPKPTHHGAYPNETFGPDRGWMVQQQVNPNPPRIEEGRSHISNVGRPNDHYTPDYPVSNYPLGQRAGHEISNEGFHDKPLGGIPLNSANRSAEERGFHYGNNLYPPGPDSIHSAGHSHMHHPQPNIWQNVSNPIAGPPGLPMQINGTVNQTVIRNPIETAPRYSTGMENQGVLVGSPQRISGFDGMSSLGQPSYPNPHLQDRAFPLDPNWVPSENPTVHNEHLQVREPLPGPLLQTNLTAAPIMQTPVMQTSVESKLAQGGEQFNYVNTGISNGVPYQDKPQPLAGGKKDMGNLVEVNPSAATLEGAELSVERLSFLPELMESVKRAALEGAAEVKAHPEEAKDQVRPELVENESEHMNAQDEPEIDSDSDNPNNFKIEQTKAEAEAKSRGLQSIRNDDLEEIRELGHGTYGSVYHGKWKGSDVAIKRIKASCFAGKPSERERLIEDFWKEALLLSSLHHPNVVSFYGIVRDGPDGSLATVAEFMVNGSLKQFLQKKDRTIDRRKRLIIAMDTAFGMEYLHGKNIVHFDLKCENLLVNMRDPQRPICKIGDLGLSKVKQKTLVSGGVRGTLPWMAPELLSGKSNMVSEKIDVYSFGIVMWELLTGEEPYADMHCASIIGGIVNNALRPKIPQWCDPEWKGLMESCWTSEPTERPSFTEISQKLRTMAAAMNLK

SEQ ID NO: 5095 - protein, 216 aa, Arabidopsis thaliana
MEGTKRSSLGARKKLKRKKCRRLVRSIVTYLKSDTYLFAPLFSNFPPLTTEIDTPPPSNSKPSTVDDISMEGFESLGIEKLIKKRRMSEKVKEYLKSDCYMYSPMISSPPKLGSSVKGKMQITMEVSTKLSTTTMKEDDSGYRNLRSDIAEQTLHKGRINSPKPALVILEGQRTGLGRETDLSPAFSSPTGLLIDCTNHGMKMEFVRRFFKHWITK

SEQ ID NO: 5096 - protein, 309 aa, Arabidopsis thaliana
MASSSLVRIAVVGDIHGFWNLDEDRKALRVLQPDLVLFTGDFGEENVPLVQSVAALTFPKAVILGNHDAWFTQDFPRKEKQKQNGVQMQLDILGDEHIGYQRMDFPSFKLSIVGGRPFSHGGDRLFRKNLLVQRYGVHDMEASAGSICRAAHGTPEDHVAIILAHNGPTGLGWQAEDICGKDWGAEGGDHGDPDLEQAIRQLKETTKLSIPLVVFGHMHKELQRGKGNRKMVVQDSDNQTVYVNGAIVPRVKEAKKRGAAESESGGTTRAFTLVEILDGKIKKIAEIWVHVNGSMAKIVEENTLFEDVT

SEQ ID NO: 5097 - protein, 465 aa, Arabidopsis thaliana
MSLDTSLGLKLKKRLKLSSFSSNSSYKGKSRSITQRSDDDTNSRKTTVSSMKKKRVYPNKAKHNNHVNEIPRTMWVASKRNQGSTSSFKTANDAATSVFKTKSRSGVDVTRKSYRKRDELDSNVDVSPRESSDVPSFKARKQVFSEKRVVGDGSDVQEDKPRKRKRIRLDPYDTSNKRIVDDVLLDDGLRVKNIKDAVKSVEMSKNAQFRAIQPSHSILSYVEENLLGRRRLIELKRAGYNTELPAPLDNIPQSTSTERERIEESVFRNKLEFFAAANVSSSFPPPDVPEIAFAGRSNVGKSSLLNALTRQWGVVRTSDKPGLTQTINFFGLGPKVRLVDLPGYGFAFAKDEVKEAWEDLVKEYVSTRTSLKRVCLLVDTKWGMKPRDQELINLMERSNTKYQIVLTKTDVVFPIDVARRAMQIEEKLKANRSIVQPLMMVSSRSGAGIGSLRTALAKIARFAKF

SEQ ID NO: 5098 - protein, 484 aa, Arabidopsis thaliana
MSSKRRRRFNLRTVFSIIFLTFLPLNLNSQEIVEVFDSSQDHFLIQSRVYANHRSLIDTPLPGKDPALDASPPSPESAILKDPLLPPPPPEGNETPSPPRSGVPTQTPETPPAITPLPVPLAPAPSPSPPVSPGTTKKSPKVYMIVGIVGGVFTVSVALIIIFLILTRKIPIKPWTNSGQLRDDLITDVPRLQLSELQAACEDFSNVIGSFSDGTIYKGTLSTGAEIAVVSIVAGSRSDWSTTMDTQLLQKMHNLSKVDHKNFLNVIGYCLEEEPFKRMLVFEYAPNGSLSEHLHSQYVEHLDWPTRLRIVMGIAYCLEHMHNLNPPILLSNLDSSSVYLTEDNAAKVSDFSVINSIFPSKEGSSSKNLLEPSLLDPHTNVFNFGAVLFEIISGKLPDPDSMLLEPKPTRDIVDPTLKTFQENVVERLLEVVRQCLNPYSDQRPTMREVVVKLREITGIEADAAMPRLSPRWWTELEIISTEGN

SEQ ID NO: 5099 - protein, 521 aa, Arabidopsis thaliana
MTHQTHQRRRRRHSAVCHRHPSSKPTTGFCATCLRERLSTIEALSSSVSASTELRRVRSYSVRDASASVLDQPRRRSCDVRSNHDDDDDDELLKSSIRFPIVPDLIEDEEEEDDEGKKLVEEEIEDGEQKTMKELIDLESRNQQLKNNGKDSVFSRTLRKFSLKHHRKIPDSGNSLGRRSCDVDPRLSLDAGRVSFDEPRASWDGCLIGKTYPKLIPLSSVTEDVKASPEKITGEKVEEDEKNNPGGTAQTRDYYLDSRRRRSFDRSSRHGLLEVDELKAISNAKVSPETVGLFHGAKLLVTERELRDSNWYSIKNYKPESLELGSKGVGCVAAGEVKKQDGFGLKKSGKNWSKGWNFWGLIQRKTDVAKNEMKTEQSLKLGGNTMEGSLAESLLKLRRVAKGETNGDVSEKLIRSYSVSARKSCDGMLRGASIVNGFEGGRSSCDGLFHGSITGVETGRRSLCEDGMFHGVEGKRNHLLQSDDKLGTYSPDNLRNGMVRFYLTPLNSHMTSKSGKSRLMN

SEQ ID NO: 5100 - protein, 559 aa, Arabidopsis thaliana
MLPGILLCSLNPRNHSKKKKSERESLETEPKDIDYWYSVQFNRDPPRFALKSENNNHHSRSKSGGDFCKKKKRGEMANKVSNFSDLIQRVTASCLLHPLSAGRQDLAVNRREEYDTEEEENEEEGEIQYEDALEKENGKDETIRAKNGRNGVSVETVQEMEMVMDEVFTAAAAMKRAYVALQEAHSPWDPEKMHDADMAMVAELRRIGSLRERFRRMRGTGSGGRRKNDAGRGMLREAVAPYEAVVKELKKEVKVKDTEIENLKEKVKVASMANGNGGKKHRLLSSRKVNCTTQIAVSPVPELFEMTMIQVKEASKSFTGILLSLMRAAHWDIAAAVRSIEAASASSDGMSASSFASSVQSSVPNQHAKFALESYICRKIFQGFDHETFYMDGSLSSLINPDQYRRDCFAQFKDMKAMDPMELLGILPTCHFGKFCSKKYLSIIHQKMEESLFGDSEQRELVVAGNHPRSQFYGEFLGLAKAVWLLHLLAFSLDPSPSHFEANRGAEFHSQYMESVVRFSDGRVPAGQVVGFPVCPGFKLSHQGKGSIIKSRVYLVPRA

SEQ ID NO: 5101 - protein, 489 aa, Arabidopsis thaliana
MGPRCSKLSLCWWPTHLKSTHNEASDLDNGTDDLPSFTEFSFDQLRAATCGFSTDSIVSEHGVKAPNVVYKGRLEDDRWIAVKRFNRSAWPDTRQFLEEAKAVGQLRNERLANLIGFCCEGDERLLVAEFMPFETLSKHLFHWDSQPMKWSMRLRVALYLAQALEYCSSKGRALYHDLNAYRILFDQDGNPRLSCFGLMKNSRDGKSYSTNLAFTPPEYLRTGRVIPESVVYSFGTLLLDLLSGKHIPPSHALDLIRGKNFLMLMDSCLDGHFSNDDGTDLVRLASRCLQYEARERPNVKSLVSSLAPLQKETDIPSHVLMGIPHGAASPKETTSLTPLGDACSRHDLTAIHEILEKVGYKDDEGVANELSFQVWTDQIQETLNSKKQGDAAFKGKDFVTAVECYTQFIEDGTMVSPTVFARRCLCYLMSNMPQEALGDAMQAQVVSPEWPTAFYLQAAALFSLGMDKDACETLKDGTSLEAKKHNNRN

SEQ ID NO: 5102 - protein, 377 aa, Arabidopsis thaliana
MADGEDIQPLVCDNGTGMVKAGFAGDDAPRAVFPSIVGRPRHTGVMVGMGQKDAYVGDEAQSKRGILTLKYPIEHGIVNNWDDMEKIWHHTFYNELRVAPEEHPVLLTEAPLNPKANREKMTQIMFETFNTPAMYVAIQAVLSLYASGRTTGIVLDSGDGVSHTVPIYEGYALPHAILRLDLAGRDLTDHLMKILTERGYSFTTTAEREIVRDMKEKLSYIALDFEQELETSKTSSSVEKSFELPDGQVITIGAERFRCPEVLFQPSMIGMENPGIHETTYNSIMKCDVDIRKDLYGNIVLSGGTTMFGGIGDRMSKEITALAPSSMKIKVVAPPERKYSVWIGGSILASLSTFQQMWIAKAEYDESGPSIVHRKCF

SEQ ID NO: 5103 - protein, 578 aa, Arabidopsis thaliana
MVSHKCVEEFGYASYLVPSNARAPRSARKRRSIEKRISKEDDNMCAIDLLATVAGHLSFESGSSLMSIDKLIEDHRVKEEFPEEEKPLMPVALSPYRGSLSPCGFSSVINGKVENEVDGFSYSGGSDACQVGNFSQDVKPDIDGDAVVLDARPNVVVSLGSSSRTEVPSIGNCVSHGVRDDVNLFSRDDDENFSKYIHPRVTKHSPRTVPRIGDRRIRKILASRHWKGGSRHSDTKPWRNYYLHQQRSYPIKKRKNFDHISDSVTDDYRMRTKMHRGSRKGQGASFVASDSHVKLRIKSFRVPELFIEIPETATVGSLKRMVMEAVSTLLSDGHRVGLMVQGKKVRDDNKTLHQTGISQDNSHLDSLDFSLEPSSEMPQLLTSHPLGHACEELLPVCQATKIDNVLESDHHDSALFPSDSLGNNNVTEDSKAMISVALNELSSQSQPPSRKSRRSEQQQQQAAQRRIRRPFSVAEVEALVQAVEKLGTGRWRDVKLCAFEDADHRTYVDLKDKWKTLVHTAKISPQQRRGEPVPQELLNRVLNAHGYWTQQQMQQLQQNVNKLEQETQSQTTEGLLLL

SEQ ID NO: 5104 - protein, 235 aa, Arabidopsis thaliana
MKLVQEEYRKGPWTEQEDILLVNFVHLFGDRRWDFVAKVSGLNRTGKSCRLRWVNYLHPGLKRGKMTPQEERLVLELHAKWGNRWSKIARKLPGRTDNEIKNYWRTHMRKKAQEKKRPMSPTSSSSNCCSSSMTTTTSQDTGGSNGKMNQECEDGYYSMDDIWREIDQSGANVIKPVKDNYYSEQSCYLNFPPLASPTWESSLESIWNMDADESKMSSFAIDQFPLSFEHGSGRL

SEQ ID NO: 5105 - protein, 245 aa, Arabidopsis thaliana
MSTGLDMSLDDMIAKNRKSRGGAGPARGTGSGSGPGPTRRNNPNRKSTRSAPYQSAKAPESTWGHDMFSDRSEDHRSGRSSAGIETGTKLYISNLDYGVMNEDIKELFAEVGELKRYTVHFDRSGRSKGTAEVVYSRRGDALAAVKKYNDVQLDGKPMKIEIVGTNLQTAAAPSGRPANGNSNGAPWSRGGQGRGGQQRGGGRGGGGRGGGGRGRRPGKGPAEKISAEDLDADLDKYHSGDMETN

SEQ ID NO: 5106 - protein, 499 aa, Arabidopsis thaliana
MASREVSTMIKQGFIADPSLSFSPSRISSPIKLSTASPPLPPPPPPPPNESTLSNPTLFDMMSDEHNRELPRRKSHARVAQILTEFKNGVVYGHSLGPGDVKLTVVGKDGYRVTMDVHRKVLSEKSRFFMEKMNSRREKGVSHMVEISECDDLEIYVETVVLMYSDDLKKKLIGENVIKILALLKVSAAISFDEGVMSCLEHLEAVPWSEDEEETVVTCLEELHLPDDSVTLILQRVSSQPSTSSTRTRTDDIFSKLLTGVLQAKDDKARREMKVLIFKLVREEADYDVSRDTLYGLCHRCLTSLVLCLSEVTTQMNDPGKDRGALMGEIAREADNMLWMVDILIEKKLCSEFVKLWADQKELANLHSKIPTMYRHEISKITAQICVGIGKGRILVNRETRFAVLNTWLEALYDDFGWMRRLSSRSLDRKLVEDGLSQTILTLSLRQQQVILMKWFDRFLSKGDDCPNVQRAFEVWWRRAFIRQVLTEPDEPRLQITLY

SEQ ID NO: 5107 - protein, 522 aa, Arabidopsis thaliana
MCFNNIETGDEVETERQVFGSSEEDEFRVEDTARNTNNVQISQQQQQPLAHVVKWERYLPVRSLKVLLVENDDSTRHIVTALLKNCSYEVTAVPDVLEAWRILEDEKSCIDLVLTEVDMPVHSGTGLLSKIMSHKTLKNIPVIMMSSHDSMVLVFKCLSNGAVDFLVKPIRKNELKNLWQHVWRRCHSVRVLIWLPVLQKLLCVFFLLMRLLIYQSSGSGSESGIHDKKSVKPESTQGSENDASISDEHRNESGSSGGLSNQDGGSDNGSGTQSSWTKRASDTKSTSPSNQFPDAPNKKGTYENGCAHVNRLKEAEDQKEQIGTGSQTGMSMSKKAEEPGDLEKNAKYSVQALERNNDDTLNRSSGNSQVESKAPSSNREDLQSLEQTLKKTREDRDYKVGDRSVLRHSNLSAFSKYNNGATSAKKAPEENVESCSPHDSPIAKLLGSSSSSDNPLKQQSSGSDRWAQREAALMKFRLKRKERCFEKKVRYHSRKKLAEQRPHVKGQFIRKRDDHKSGSEDN

SEQ ID NO: 5108 - protein, 788 aa, Arabidopsis thaliana
MEFDLNTEIAEVEEEENDDVGVGVGGGTRIDKGRLGISPSSSSSCSSGSSSSSSSTGSASSIYSELWHACAGPLTCLPKKGNVVVYFPQGHLEQDAMVSYSSPLEIPKFDLNPQIVCRVVNVQLLANKDTDEVYTQVTLLPLQEFSMLNGEGKEVKELGGEEERNGSSSVKRTPHMFCKTLTASDTSTHGGFSVPRRAAEDCFAPLDYKQQRPSQELIAKDLHGVEWKFRHIYRGQPRRHLLTTGWSIFVSQKNLVSGDAVLFLRDEGGELRLGIRRAARPRNGLPDSIIEKNSCSNILSLVANAVSTKSMFHVFYSPRATHAEFVIPYEKYITSIRSPVCIGTRFRMRFEMDDSPERRCAGVVTGVCDLDPYRWPNSKWRCLLVRWDESFVSDHQERVSPWEIDPSVSLPHLSIQSSPRPKRPWAGLLDTTPPGNPITKRGGFLDFEESVRPSKVLQGQENIGSASPSQGFDVMNRRILDFAMQSHANPVLVSSRVKDRFGEFVDATGVNPACSGVMDLDRFPRVLQGQEICSLKSFPQFAGFSPAAAPNPFAYQANKSSYYPLALHGIRSTHVPYQNPYNAGNQSSGPPSRAINFGEETRKFDAQNEGGLPNNVTADLPFKIDMMGKQKGSELNMNASSGCKLFGFSLPVETPASKPQSSSKRICTKVHKQGSQVGRAIDLSRLNGYDDLLMELERLFNMEGLLRDPEKGWRILYTDSENDMMVVGDDPWHDFCNVVWKIHLYTKEEVENANDDNKSCLEQAALMMEASKSSSVSQPDSSPTITRV

SEQ ID NO: 5109 - protein, 407 aa, Arabidopsis thaliana
MFRDSFLFARTIGCFGCFGSSGSRNQQSPKPYDDDTHSCDSDVTSTARGEEEEDEEEVEQKSRSKRSEEILKYRLDNGLICRHIPVRETNELIRGEDENGDKTINEYVRVCKIGSGSYGKVVLYRSTLDGQYYAIKAFHKSHLLRLRVAPSETAMSDVLREVMIMKILEHPNIVNLIEVIDDPETDHFYMVLEYVDGKWVYDGSGPPGALGEKTARKYLRDIVTGLMYLHAHDVIHGDIKPDNLLVTSSGTVKIGDFSVSQVFKDDDDQLRRSPGTPVFTAPECCLVSGITYSGRAADTWAVGVTLYCMILGQYPFLADTLQDTYDKIVNNPLIIPDGLNPLLRDLIEGLLCKDPSQRMTLKNVSEHPWVIGEDGHVPEYFCWCKRNAASKIEEGEANGISETSDPN

SEQ ID NO: 5110 - protein, 393 aa, Arabidopsis thaliana
MAAEEHSNKRREVSASASASASASVVVNLRVGEEDNDGHRLRLGSSDSVLPGLIDDVALNCLAWVPRSDYPSLSCVNKKYNKLINSGHLFALRKELGIVEYLVFMVCDPRGWLMFSPMKKKWMVLPKMPCDECFNHADKESLAVDDELLVFGRELFQFAIWKYSLRSRCWVKCEGMHRPRCLFASGSLGGIAIVAGGTDMNGNILASAELYDSSSGRWEMLPNMHSPRRLCSGFFMDGKFYVIGGMSSPNVSVTFGEEFDLETRKWRKIEGMYPNVNRAAQAPPLVVVVNNELFTLEYSTNMVKKYDKVKNKWEVMGRLPPMVDSSNGWGLAFKPCGDQLLVFCGQRGPHGEGIVVNSWCPKSGAKDGNLDWKVLGVKENVGVFVYNCAVMGC

SEQ ID NO: 5111 - protein, 494 aa, Arabidopsis thaliana
MATEEKPLNSLDLSHDDSSPASNQAEGSSAITEDTSANVQQWRRKNLSLQIPSRAAGLSPEDSVVIKMPPTPSPTPRRVNFALTSSSPGPTPTSSSVLPRGKSSLKNLLPKAGCKPKTSNTDIEKGQGNACSPPASQEKASISRSLSLSKLFTPRIKRTSSLPVTPVILSNSESAHGGTSVAPQTPNRKGSVHIARSRSVPLNDKELSLKGMDSFFRVIPSTPRVKEGDVFSNASEAGNTETGDADGEDIPEDEAVCRICLVELCEGGETLKMECSCKGELALAHKDCALKWFTIKGNKTCEVCKQEVKNLPVTLLRIQSLRNSGVPQLDVSGYRVWQEVPVLVIISMLAYFCFLEQLLVENMGTGAIAISLPFSCILGLLASMTASTMVLEYSYAVMRRFVWIYASVQFALVVLFAHIFYSVVKLQPVLSVLLSTFAGFGVCICGSSVMVEFVRWRRRWRARRLEQQLNHALTLSQPPQPLDPTTSLHHSNTS

SEQ ID NO: 5112 - protein, 842 aa, Arabidopsis thaliana
MEMAVANHRERSSDSMNRHLDSSGKYVRYTAEQVEALERVYAECPKPSSLRRQQLIRECSILANIEPKQIKVWFQNRRCRDKQRKEASRLQSVNRKLSAMNKLLMEENDRLQKQVSQLVCENGYMKQQLTTVVNDPSCESVVTTPQHSLRDANSPAGLLSIAEETLAEFLSKATGTAVDWVQMPGMKPGPDSVGIFAISQRCNGVAARACGLVSLEPMKIAEILKDRPSWFRDCRSLEVFTMFPAGNGGTIELVYMQTYAPTTLAPARDFWTLRYTTSLDNGSFVVCERSLSGSGAGPNAASASQFVRAEMLSSGYLIRPCDGGGSIIHIVDHLNLEAWSVPDVLRPLYESSKVVAQKMTISALRYIRQLAQESNGEVVYGLGRQPAVLRTFSQRLSRGFNDAVNGFGDDGWSTMHCDGAEDIIVAINSTKHLNNISNSLSFLGGVLCAKASMLLQNVPPAVLIRFLREHRSEWADFNVDAYSAATLKAGSFAYPGMRPTRFTGSQIIMPLGHTIEHEEMLEVVRLEGHSLAQEDAFMSRDVHLLQICTGIDENAVGACSELIFAPINEMFPDDAPLVPSGFRVIPVDAKTGDVQDLLTANHRTLDLTSSLEVGPSPENASGNSFSSSSSRCILTIAFQFPFENNLQENVAGMACQYVRSVISSVQRVAMAISPSGISPSLGSKLSPGSPEAVTLAQWISQSYSHHLGSELLTIDSLGSDDSVLKLLWDHQDAILCCSLKPQPVFMFANQAGLDMLETTLVALQDITLEKIFDESGRKAICSDFAKLMQQGFACLPSGICVSTMGRHVSYEQAVAWKVFAASEENNNNLHCLAFSFVNWSFV

SEQ ID NO: 5113 - protein, 347 aa, Arabidopsis thaliana
MLTSSCSSSSLLCHRPALSSSRSKFRVPCRTVFSPALTKISPLTASSPSKSAKHKWKILCFRNEDSAPENPEHFVPEELVKPDQDSPCTDKTDWKATFQKAADAVLKAIGTRWKVPWTVETIVQVMLLWVAAFWFIGSWMIPFMAHISGFHKESLTFRGQALFSLITDVTEGLAGIAILHRCLSMFRPLASDWFRFTLKGNWQLDVIIGCFMFPFVNRLSQLNLNLLPLPPTSSPVSLSSVEQSIMARDPVAMALYAVVVSICAPVWEEIVFRGFLLPSLTRYMPVWCAILVSSIAFALAHFNVQRMLPLVFLGVVLGLIFARSRNLLPSMLLHSLWNGFVFMELMR

SEQ ID NO: 5114 - protein, 295 aa, Arabidopsis thaliana
MVRTPCCKEEGIKKGAWTPEEDQKLIAYLHLHGEGGWRTLPEKAGLKRCGKSCRLRWANYLRPDIKRGEFSPEEDDTIIKLHALKGNKWAAIATSLAGRTDNEIKNYWNTNLKKRLKQKGIDAITHKPINSTGQTGFEPKVNKPVYSSGSARLLNRVASKYAVELNRDLLTGIISGNSTVAEDSQNSGDVDSPTSTLLNKMAATSVLINTTTTYSGFSDNCSFTDEFNEFFNNEEISDIYTTVDNFGFMEELKSILSYGDASAGVIENSPEVNVADAMEFIDSWNEDDNMVGVFV

SEQ ID NO: 5115 - protein, 429 aa, Arabidopsis thaliana
MGNSGDLEQALQDGNIFRQLNALIVAHLRHHNLSQVASAVASATMTPLNIEVPPNRLLELVAKGLAAENNGTLRGVSSSVLLPSSYGSITTPRTASIDFSVNHAKGSSKTIPKHESKTLSEHKSVVRCARFSPDGMFFATGGADTSIKLFEVPKVKQMISGDTQARPLIRTFYDHAEPINDLDFHPRSTILISSAKDNCIKFFDFSKTTAKRAFKVFQDTHNVRSISFHPSGEFLLAGTDHPIPHLYDVNTYQCFLPSNFPDSGVSGAINQVRYSSTGSIYITASKDGAIRLFDGVSAKCVRSIGNAHGKSEVTSAVFTKDQRFVLSSGKDSTVKLWEIGSGRMVKEYLGAKRVKLRSQAIFNDTEEFVISIDEASNEVVTWDARTADKVAKWPSNHNGAPRWIEHSPVESVFVTCGIDRSIRFWKESV

SEQ ID NO: 5116 - protein, 639 aa, Arabidopsis thaliana
MAEFDSKVPVSGMNNHVFEACHHVVKALRASDNNLDANLRKLLSDLEMHLSTFGIADTKVEDAGFSEIKKRFKEAVKRIRSWETNQSTMFEAGLSEADQFFQALYDVQTVLVGFKALPMKTNQMEKDVYNQATVALDIAMLRLEKELCDVLHQHKRHVQPDYLAVSSRRKDIVYDESFVSLDDEVIVEASSHEDDEQISDFYNSDLVDPIVLPHIKAIANAMFACEYDQPFCEAFIGVQREALEEYMVTLEMERFSCVDVLRMDWEDLNGAMRKWTKVVKIITQVYLASEKQLCDQILGDFESISTACFIEISKDAILSLLNFGEAVVLRSCKPEMLERFLSMYEVSAEILVDVDNLFPDETGSSLRIAFHNLSKKLADHTTTTFLKFKDAIASDESTRPFHGGGIHHLTRYVMNYLKLLPEYTDSLNSLLQNIHVDDSIPEKTGEDVLPSTFSPMARHLRSIVTTLESSLERKAQLYADEALKSIFLMNNFRYMVQKVKGSELRRLFGDEWIRKHIASYQCNVTNYERSTWSSILALLRDNNDSVRTLRERCRLFSLAFDDVYKNQTRWSVPDSELRDDLHISTSVKVVQSYRGFLGRNAVRIGEKHIRYTCEDIENMLLDLFECLPSPRSLRSSRKR

SEQ ID NO: 5117 - protein, 174 aa, Arabidopsis thaliana
MLQEPSAAFSLRRNSFRRRSPRSNVDDRGWNPLHIKARKGDLKSVKQLLDQGMDVNALAWGPKSKGVSALHLAAEGGHIEVMDLLLERGANIDAKTWGSCGWTPLHAAAKERKREAVKFLVENGAFLADDITDTRFNPPVHYCHGLEWAYEEMKKLNSESSSSSGGDTSSSSDN

SEQ ID NO: 5118 - protein, 618 aa, Arabidopsis thaliana
MDLNGECKGGDGFIDRSRVRILLCDNDSTSLGEVFTLLSECSYQVTAVKSARQVIDALNAEGPDIDIILAEIDLPMAKGMKMLRYITRDKDLRRIPVIMMSRQDEVPVVVKCLKLGAADYLVKPLRTNELLNLWTHMWRRRRMLGLAEKNMLSYDFDLVGSDQSDPNTNSTNLFSDDTDDRSLRSTNPQRGNLSHQENEWSVATAPVHARDGGLGADGTATSSLAVTAIEPPLDHLAGSHHEPMKRNSNPAQFSSAPKKSRLKIGESSAFFTYVKSTVLRTNGQDPPLVDGNGSLHLHRGLAEKFQVVASEGINNTKQARRATPKSTVLRTNGQDPPLVNGNGSHHLHRGAAEKFQVVASEGINNTKQAHRSRGTEQYHSQGETLQNGASYPHSLERSRTLPTSMESHGRNYQEGNMNIPQVAMNRSKDSSQVDGSGFSAPNAYPYYMHGVMNQVMMQSAAMMPQYGHQIPHCQPNHPNGMTGYPYYHHPMNTSLQHSQMSLQNGQMSMVHHSWSPAGNPPSNEVRVNKLDRREEALLKFRRKRNQRCFDKKIRYVNRKRLAERRPRVKGQFVRKMNGVNVDLNGQPDSADYDDEEEEEEEEEEENRDSSPQDDALGT

SEQ ID NO: 5119 - protein, 366 aa, Arabidopsis thaliana
MSRKPCCVGEGLKKGAWTTEEDKKLISYIHDHGEGGWRDIPQKAGLKRCGKSCRLRWTNYLKPEIKRGEFSSEEEQIIIMLHASRGNKWSVIARHLPRRTDNEIKNYWNTHLKKRLMEQGIDPVTHKPLASSSNPTVDENLNSPNASSSDKQYSRSSSMPFLSRPPPSSCNMVSKVSELSSNDGTPIQGSSLSCKKRFKKSSSTSRLLNKVAAKATSIKDILSASMEGSLSATTISHASFFNGFTEQIRNEEDSSNTSLTNTLAEFDPFSPSSLYPEHEINATSDLNMDQDYDFSQFFEKFGGDNHNEENSMNDLLMSDVSQEVSSTSVDDQDNMVGNFEGWSNYLLDHTNFMYDTDSDSLEKHFI

SEQ ID NO: 5120 - protein, 359 aa, Arabidopsis thaliana
MARSDVLIFVSTLLLFLSLLTVADAELVKSDKFPVVVSTWPFLEAVRAAWRAVDNGSSAVEAVVEGCSACEELRCDGTVGPGGSPDENGETMIDALVMDGVTMEVGAVAAMRYVKDGIRAAHLVMKYSQHTLLAGEGASAFAISMGLPGPMNLSSPESVKKWSDWKENQCQPNFRKNVVPANDCGPYKPNNSAMNVFVDKSTESCEMGAIEYKPPLVGPHNHDTISMAVIDRMGHIAVGTSTNGATYKIPGRVGDGPIVGSSAYADDEVGGCGATGDGDTMMRFLPCYQVVESMRQGMKPEEAAKDAISRIARKFPDFVGAVVAVDKNGSHAGACYGWTFQYSVQNPDMNDVQVFTVLP

SEQ ID NO: 5121 - protein, 361 aa, Arabidopsis thaliana
MRKSHLVKLILAVSLPTTFLIMIAIIIIFIFCRRTTTETNEVQYDVESPYEKQEFSDNGSETEEELIIFNGGEDLTICDILDAPGEVIGKSSYGTLYKATLQRSGKVRVLRFLRPLCAVNSDSKEFNGVIESLGFVRHDNLVPLLGFYVGNRGEKLMIHPFFGSSGNLSAFIKFLAGGDVDAHKWSNILSITIGIAKALDHLHTGMQKPIVHGNLKSKNVLLDKSFRPRVSDFGLHLLLNLAAGQEVLEASAAEGYKAPELIKMKEVSKESDVYSFGVIMLELVSGKEPTNKNPTGSVLDRNRLSDLYRPEIIRRCLKDGNGVTEECVLEYFQLAMSCCSPSPTLRPSFKQVLRKLEEIRK

SEQ ID NO: 5122 - protein, 915 aa, Arabidopsis thaliana
MPSDIMEQRGVSTPSHFHEDIHITSERQFGFMKTDMMPENQGGRDRLSSMPKSSWTSESYQLKPQSSFSGSHPSGSPNARNTTNGSQWESSLFSSSMSDLFSRKLRLQGSDMLSTMSANTVVTHREEEPSESLEEIEAQTIGNLLPDEDDLFAEVTGEVGRKSRANTGDELDEFDLFSSVGGMELDGDIFSSVSHRNGERGGNNSVGELNRGEIPSRTLLVGNISSNVEDYELKVLFEQFGDIQALHTACKNRGFIMVSYCDIRAAQNAARALQNKLLRGTKLDIRYSISKENPSQKDTSKGALLVNNLDSSISNQELNRLVKSYGEVKEIRRTMHDNSQIYIEFFDVRAAAAALGGLNGLEVAGKKLQLVPTYPEGTRYTSQCAANDTEGCLPKTSYSNTSSGHIGRHFPGMISSTSSDGGSMRVIHNSIGSPVNSFIERHRSLSIPIGFPPSANGISASKPVGLQEHGHHFDNSNMGIQSMPNLHPHSFSEYVDNFANGSPYTSSAFSEMVSDGSKANEGFMIHNVRGVEGFSGGGIGSPMHQSSRRPINLWSNSNTQQQNPSSGMMWPNSPSHINSIPTQRPPVTVFSRAPPIMVNMASSPVHHHIGSAPVLNSPFWDRRQAYVAESLESSGFHIGSHGSMGIPGSSPSHPMDIGSHKTFSVGGNRMDVNSQNAVLRSPQQLSHLFPGRSPMGSMPGSFDSPNERYRNLSHRRSESSSSNADKKLYELDVDRILRGEDRRTTLMIKNIPNKYTSKMLLSAIDEHCKGTYDFLYLPIDFKNKCNVGYAFINLIEPEKIVPFFKAFNGKKWEKFNSEKVATLTYARIQGKTALIAHFQNSSLMNEDKRCRPILFHTDGPNAGDQEPFPMGSNIRSRPGKPRSSSIDNYNSFSISSVSENREETPNGTDPFLKEN

SEQ ID NO: 5123 - protein, 816 aa, Arabidopsis thaliana
MASSTSGIFFQGDDESQSFINSHLTSSYGNSSNSAPGCGGPTGGYHNLSMVSGDMHNPVMMSVSTPGPSAGASSLVTDANSGLSGGGPHLQRSASINNESYMRLPASPMSFSSNNISISGSSVVDGSTVVQRHDPSVQLGGSSATSLPTSQTNQIPLSMARRASESFFQDPNNLTQARKKPRLDSKQDDALQQQILRQWLQRQDILQQQQQQQQQGQNPQFQILLQQQKLRQQQQYLQSLPPLQRVQLQQQQQVQQQQQLQQQHQQQQQQLQQQGMQMQLTGGPRPYENSVCARRLMQYLYHQRQRPSESSIVYWRKFVTEYFSPRAKKRWCLSHYDNVGHSALGVSPQAATDEWQCDLCGSKSGRGFEATFDVLPRLNEIKFASGVLDELLYLGVPSERRYGSGIMVLEYGKAVQESVYEHIRVVREGHLRIIFSQELKILSWEFCTRRHEELLPRRLVAPQVNQLLQVAEKCQSTIDQSGSDGIHQQDLQANSNMVMAAGRQLAKSLESHSLNDLGFSKRYVRCLQISEVVSSMKDMIDFCRDQKVGPIEALKSYPYRMKAGKPQMQEMEQLAAARGLPPDRNSLNKLMALRNSGINIPMNNMSGQGSLPGSAQAAAFALTNYQSMLMKQNHLNSDLNNTTIQQEPSRNRSASPSYQGTSPLLPGFVHSPSISGVSSHLSPQRQMPSSSYNGSTQQYHQQPPSCSSGNQTLEQQMIHQIWQQMANSNGGSGQQQQSLSGQNMMNCNTNMGRNRTDYVPAAAETPSTSNRFRGIKGLDQSQNLEGIISNTSLNFGNNGVFSNEVDESMGGYSWKS

SEQ ID NO: 5124 - protein, 345 aa, Arabidopsis thaliana
MNFFSLVCEICFKAAYYDLARPVDVALETGFVVIRSCVDQCQKTGCVGDTCFQHCKFSADGKAIDGPWYMQEPLYLRWKQWDCQSDCQYECMMTREEERKRNGERPTKYFGKWPLKHVYGIQEPVSVAFSALDLAMQFQGWVSYFILVYYKLPLQPNRKTYYEYNGIVHIYAIIVMNSLFWSSICHSRDVELTERLDYSSATVLAGFSLILAILRSFSIQDQSVKIMVTAPILAVVATHILYLNFYNLDEGLHWKVIFGIGGIELVVWGLWAALTSHPSKWKLRAFLISSILTLCLRMFDFPPYKGYIDAHALWRGAGIPLSYLWWSFVCDDAVFRTTVNLKKSK

SEQ ID NO: 5125 - protein, 681 aa, Arabidopsis thaliana
MRKPKLSKLERLEKFDIFVSLSKQRSVQILMAVGLLYMLLITFEIPFVFKTGLSSLSQDPLTRPEKHNSQRELQERRAPTRPLKSLLYQESQSESPAQGLRRRTRILSSLRFDPETFNPSSKDGSVELHKSAKVAWEVGRKIWEELESGKTLKALEKEKKKKIEEHGTNSCSLSVSLTGSDLLKRGNIMELPCGLTLGSHITVVGKPRAAHSEKDPKISMLKEGDEAVKVSQFKLELQGLKAVEGEEPPRILHLNPRLKGDWSGKPVIEQNTCYRMQWGSAQRCEGWRSRDDEETVDGQVKCEKWARDDSITSKEEESSKAASWWLSRLIGRSKKVTVEWPFPFTVDKLFVLTLSAGLEGYHVSVDGKHVTSFPYRTGFTLEDATGLTINGDIDVHSVFAGSLPTSHPSFSPQRHLELSSNWQAPSLPDEQVDMFIGILSAGNHFAERMAVRRSWMQHKLVKSSKVVARFFVALHSRKEVNVELKKEAEFFGDIVIVPYMDSYDLVVLKTVAICEYGAHQLAAKFIMKCDDDTFVQVDAVLSEAKKTPTDRSLYIGNINYYHKPLRQGKWSVTYEEWPEEDYPPYANGPGYILSNDISRFIVKEFEKHKLRMFKMEDVSVGMWVEQFNNGTKPVDYIHSLRFCQFGCIENYLTAHYQSPRQMICLWDKLVLTGKPQCCNMR

SEQ ID NO: 5126 - protein, 540 aa, Arabidopsis thaliana
MKTTKGGKVMNPTDAYRKQIRKREIKRVNSFAVAKKVKMRFLPSCSIGVSLSNKKERQKVREVGILKKDPEQIKDQIRKLDMSKAEGALDKARKHKKRQLEDTLKMVEYDEKKKEQGEATTSVMFSHLPPQRRLTGEEDLKPEDSVYYHPTLNPTGAPPPGKPPMYNSSIGLAISSDGASSSSAALSSITESEDSVLVNPPPLPPLPDGDNALSASLPLPPLPPLPPTTGLTLPHSPFPPPPPGPPPKEQDFVRPPLPPPPQLPQSSQPPPPGLSGSQGDGRFPESSDFTFDNRMNANITSVPLLPPPGIPSNESESRPAESNASSFQNANLSKMVAPPPPAPLHQQHQSTFAGAAASLTNFQPDVHPPPGMLRFPPPPPPLDMHPPHPGMFVGHLIPRPPYGPPPGPPPMMRPPLPPGPPPSSFQDGQAMIRPYVPNKPSFVKSAAPTVVRRPLAQHTPELTSMVPASVRVRRESATVTKPKPKTSIASSLSFTPRAMASAATVKVEPAKTSAASKPQSIDDSYTAFLEDMKALGALDG

SEQ ID NO: 5127 - protein, 661 aa, Arabidopsis thaliana
MDNNYQNYHHHHNHNHQQQWRPAPTQPNICPICTVPHFPFCPPYPPPSSFAYNPNFPPPPHLNSPRPGFDSFTGPPVRPPQNHYPPWQPHHGNQWRPVAVDVDREADRSYKRARIDTIAGGSPGYGVSESPSPRISWENERRLKMVRDHGYGLAAPSNIEMNHQYGSEFRNGGQFNGVAPLPPPPPHHPPPYGGYFSGSNGQPPLPVSPPPPLPSSHPSSLFPVTTNSSPTIPPSSSYPQMPNASPSSAQLAPTRSKVIDVSHLLKPPHRSTRPDHFVIILRGLPGSGKSYLAKLLRDVEVENGGSAPRIHSMDDYFMTEVEKVEESDSTSLSSGRSKRPIVKTVMEYCYEPEMEEAYRSSMLKAFKRTLEDGAFSFVIVCFLELTVSCWYMSLILVDDRNLRVADFTQFWATAKRSGYEAYILEATYKDPTGCAARNVHGITVDQVQQMAEQWEEAPSLYMQLDIKSFTRWDDLKENEIQEVDMDMEDDFGLPERKSDNSTQSEEKGATEGSYKSESKWDAESGSRTEEVKELSRSKWSNVEEDETENSQSMRRNSKSLPKSSQERQRKGKSVWWGDKGGDAGFSIGAARNMNMPSLIIGPGSGYNVKSNPLSAEESRALADAIGKAKVRGIFQDQLRAERESFKAVFDKRHVRIVTKDK

SEQ ID NO: 5128 - protein, 140 aa, Arabidopsis thaliana
MSSAEDVKEQGNLTNEAEKSMPSSQQEEAVVKKKYGGLMPKKPPLISKVSEVTGLIRDFGVSFLVFLRCVYNQDHERAYFDSADWALGKQGVAKPKGPLEALRPKLQPTQQQTRYRKSPCAPSEGGEDGGAAQAEGGSGN

SEQ ID NO: 5129 - protein, 377 aa, Arabidopsis thaliana
MIRIFPSLRLTSLLSAAKPLCSSSPAKKPPQYTSLTESKSSRPTKSLSITPKTPLYLRTPSHATSLSEVWKWHDWAKDLASSVEESSKNSEDTLDSVILHRELKWLIEDSIVDDPLVILHRSEIADNGEKNVKLRASLEELYDLWRQRIEKRRPFQYVVGCEHWRDLVLCVEEGVLIPRPETELIVDMVEELVTRDEWFKKDIWADLGTGSGAIAIGIAKVLGSRGRVIATDLSPVAIAVAGHNVQRYSLEGMIEVREGSWFEPLKDLEGKLVGLVSNPPYIPSDDIPGLQAEVGRHEPKLALDGGIDGTDSLFHLCHGASRMLQPGGFFVFETNGEKQSKMIVDYMMTSDLKDCFSDLKIVSDFAGINRFVTGFRL

SEQ ID NO: 5130 - protein, 333 aa, Arabidopsis thaliana
MKGILGFEYGIVQAPLGPDISGPELVAAVANAGGIGLLRCPDWECPDYLRELIRKTKTLTEKPFGIGVVLAFPHDLNIKTILEEKVAVLQLYWGDCSQELVDDAHFAGVKVIPQVGNVEEARKAVAVGVDAIIVQGREAGGHVIGKDGLFSLLPRVVDLVGERDIPVIAAGGIVDGRGYVAALSLGAQGVCLGTRFVATHESYAHPIYKRKLIEYEKTEYTDVFGRARWPGAPQRVLETPFFDDWRSLPAHENEVNQPIIGRSTIHGVEKEIRRFSGTVPNMTTTGDLESMAMYAGQSVGLIKEILPAGEVVKSLVEEAQALILQKFNNATTT

SEQ ID NO: 5131 - protein, 348 aa, Arabidopsis thaliana
MPLDKRQRDLPLGLSPQACFKDIVGRSVLPRIPLPELGKLYAAKLQARCLQPPPFQSLLCSHDKESYGKRFSRSDMRSWCAAATTTTTPLGALESSQKRLLIFDQSGDQTRLLQCPFPLRFPSHAAAEPVKLSELQGIEKAFKEDGEEFHKSDGTESEMHEDTEEINALLYSDDDYDDDCESDDEVMSTGHSPYPNEGVCNKRELEEIDGPCKRQKLLDKVNNISDLSSLVGTESSTQLNGSSFLKDKKLPESKTISTKEDTGSGLSNEQSKKDKIRTALKILESVVPGAKGNEALLLLDEAIDYLKLLKRDLISTEVKNQSSTTHKSPILLLKETTWGTRNLQTDKA

SEQ ID NO: 5132 - protein, 282 aa, Arabidopsis thaliana
METGAGIGLYPLHRCKTIYLVRHAQGIHNVDGEKNYKAYMSHDYFDAELTQLGWKQVDSLRKHVHSSGLHKKIELVISSPLMRTLQTAVGVFGGEGYTDMSDVLPLMVANAGNSSRAAISSLNCPPVITEESCREHLGVHPCDQRRSISDYQFLFPAVDFSLIESEEDKLWKADVRETIEELAARGKKFLNWLWTRKEKEIAIVTHSGFLFHTLNALQNECHPDVKKEICGHFANCELRSMVIVDRSMLGSDSSVTDYPGKIPKGIDLPSDAVVDDNNIKVE

SEQ ID NO: 5133 - protein, 634 aa, Arabidopsis thaliana
MDLNESVVHFSRGNGIAKLDNFGDTALSLKCLGSSAGRLIGSSHHNHKLCSDVSNCPDGGCRLVLGLGPTPPSYYYNVRVNDNNNKGSASSGSVQELSSGGNSILQLGPPAVTMDTFSGLEGSLLTYADTNVSQAAVDEGSTSARRSGGYMPSLLFAPRTENVRKPSRMQECSTNCGTDAYNSQLSHESEFSVSAFSDRSASATSSQQRMSNPKKCKFMGCVKGARGASGLCIGHGGGQRCQKLGCNKGAESKTTFCKAHGGGKRCQHLGCTKSAEGKTDLCISHGGGRRCGFPEGCAKAARGKSGLCIKHGGGKRCRIESCTRSAEGQAGLCISHGGGRRCQSSGCTKGAQGSTNYCKAHGGGKRCIFAGCTKGAEGSTPLCKAHGGGKRCMFDGGGICPKSVHGGTSFCVAHGGGKRCVVAGCTKSARGRTDCCVKHGGGKRCKSDGCEKSAQGSTDFCKAHGGGKRCSWGGDWKCEKFARGKSGLCAAHNSMSQDKAGSKVGLIGPGLFRGLVSTSLQTTTTATTTTTTTDHSQSGVSAVSDCMDSIDRPLPPLHHQPEKRQKLMIPMQVLVPPSMKSLSFSNTERPDIETNNNSSGSNGRNIFDFMIPEERVHGGGLMSLLNGNMKQTLR

SEQ ID NO: 5134 - protein, 513 aa, Arabidopsis thaliana
MAAAAFGQLNLEEPPPIWGSRSVDCFEKLEQIGEGTYGQVYMAKEIKTGEIVALKKIRMDNEREGFPITAIREIKILKKLHHENVIHLKEIVTSPGRDRDDQGKPDNNKYKGGIYMVFEYMDHDLTGLADRPGLRFTVPQIKCYMKQLLTGLHYCHVNQVLHRDIKGSNLLIDNEGNLKLADFGLARSYSHDHTGNLTNRVITLWYRPPELLLGATKYGPAIDMWSVGCIFAELLNGKPILPGKTENEQLNKIYELCGSPDESNWPGVSKMPWYNQMKSSRPLKRRVREIYRHFDRHALELLEKMLVLDPSQRICAKDALDAEYFWTDPLPCDPKSLPTYESSHEFQTKKKRQQMRHNEEAAKKQKLQHPQQQHSRLPPQQHGVGQSHAAPLWPAGPNHPMNNNAPPPQIPAGGHYYGGKPRGGAPVPNRYPPSGNQTGGYNNQSRGGYSSGAYPPQGRGAPYGAGPRGPSGGYGVGPPNYSQGGGQYGGSGGSGRGQNPMGGARNQQYGWQP

SEQ ID NO: 5135 - protein, 439 aa, Arabidopsis thaliana
MSSPFSEEILIDNLAKLNSTQQSIQTLSQWCIVHRSEAELVVTTWEKQFHSTQIGQKVPLLYLANDILQNSKRQGNEFVQEFWKVLPGALKDIVSLGDDYGKGVVSRLVNIWEERRVFGSRSKSLKDVMLSEEAPPPLDVSKKRFRGSKSAKRDSKSTKTKLSSGGVSEKIVSAFNLVRAENSNEETEMNKCKSAVRRIRKMEKDVEDACSTAKDPRKESLAKELEEEENILRQSVEKLKSVEESRTSLVNHLREALREQESELENLQSQIQVAQEQTEEAQNMQKRLNNETPVNNNNGTSGQSAKITPASIAAMAEMLTSSTNSSMIMHSVLSSFAAEATQTSGLTKSNTSDTNAFVVPPNPQQYHIIPNPAASQQFPYGFGNIPLMPPGALPPPPPGTLPPHMMNNNNQPNAAQQQAQQGQSFHPPGMMYFGPPHHS

SEQ ID NO: 5136 - protein, 312 aa, Arabidopsis thaliana
MKRSRGSSDSLSGFLPIRHSTTDKQISPRPTTTGFLYSGAGDYSQMFDALEDDGSLEDLGGVGHASSTAAEKKRRLGVEQVKALEKNFEIDNKLEPERKVKLAQELGLQPRQVAIWFQNRRARWKTKQLERDYGVLKSNFDALKRNRDSLQRDNDSLLGQIKELKAKLNVEGVKGIEENGALKAVEANQSVMANNEVLELSHRSPSPPPHIPTDAPTSELAFEMFSIFPRTENFRDDPADSSDSSAVLNEEYSPNTVEAAGAVAATTVEMSTMGCFSQFVKMEEHEDLFSGEEACKLFADNEQWYCSDQWNS

SEQ ID NO: 5137 - protein, 300 aa, Arabidopsis thaliana
MMNVSGECVGRERCEELAKSSSFYRKVYSEIEEIGWEPIRRLGGDLTFFSFHILDKKGRAHNLEIQLNRDYPNSPPSVSADVPYMFTLEWSTSSRLKDVMHQFQKHLDYLQEFWSVLDNIDKSLCVVDVKQPARASAIRRIDAGNDCIIIVHIDFKDPKSLPESRFIGPVPSATHMNNLHMLWRRNCKRWSNERSFPENLECILGTELPKPLGLQVEDDQQQVECGICYAQFLPTDEELGARSGTRTDYTCENISCNKSFHSLCLTDWLRSITTTRQSFDVLFGNCPYCSDPVAVKTSNK

SEQ ID NO: 5138 - protein, 192 aa, Arabidopsis thaliana
MAGTGKCLLVTGPPGVGKTTLIMRVLDMMRVSNPNLKIQGFYTQEMRERGQRVGFQVVTLDGRTSLLASSIVSSQESMTWPSVGKYKVDIASFESIALPELQVKDDTNLFIIDEVGKMEMFSPSFFPAVLNVLDSNVPLLASIPSPKFGRHLPEVARLKNQPGVNVISLSATNRDPMKEHIFDVFSGWLPKQ

SEQ ID NO: 5139 - protein, 120 aa, Arabidopsis thaliana
MAEESRVPSSVSVTVAHDLLLAGHRYLDVRTPEEFSQGHACGAINVPYMNRGASGMSKNPDFLEQVSSHFGQSDNIIVGCQSGGRSIKATTDLLHAGFTGVKDIVGGYSAWAKNGLPTKA

SEQ ID NO: 5140 - protein, 340 aa, Arabidopsis thaliana
MPGVAFSCVPASDLGIFISESTTFSRSISASLSSSSSSPSSFRCCTPLNLKSLRSHRRPKISHICCDGSSISGSGLGDPDLEFLQASVLVAETSMHYKMRRHGFRQDSMWQTSRPLPPFSIRASESRVGVLPIGLGFLRQFKQPTIFLKISCDGDYLLPVIVGDAAVEKLLDVPLQGHTEECPDQFQFVSAVVDKLGYEVKMVKLTGRIVNTYYASLCLGKPGDIEAICIDSRPSDAINVARACQAPIYVNKAIVLEEAIKIGYGGRPQSAKPVFNVILDSAPDGPDPLSEELKLVRNMDLASKEERYIDAAMWRDRLKNLQNSSSVVYNKGVETPESYE

SEQ ID NO: 5141 - protein, 147 aa, Arabidopsis thaliana
MGFRDICYRKHHKKLKQFQKVEIKVKMDCEGCERRVRKSVEGMKGVSKVTVDPKQSKLTVEGFVQPSKVVHRVMHRTGKKAELWPYVPYEVVPHPYAPGAYDKKAPPGYVRNALADPLVAPLARASSFEVKYTSAFSDDNPNACTIM

SEQ ID NO: 5142 - protein, 326 aa, Arabidopsis thaliana
MAEKEVVSASTLESKITEDHHDIWIRGAMEKSRSSNISVLKDRFIAAEDSALVSKDVAQKDIEILLRRVKTATALLTYLKSKATTVAAADLANLSLETDQLQDTIDEHDGTYVTEMLQHVETVTGVMESLARRAFIAESEAAIEKGKVVLSQEEIQRKVGQLENMSVKLEDMEKFALGTSSILCEMRQRVDDLVEETSRQKQRATENELELSRVRRDFESLKSYVTSLISVRETLVSSEKQFQTIERLFERFIIVSKFAFMASCFRGYKQKLVAKTTQLESEKVQKEAEVQKLMEENVRLTALVDKKEAQLLAMNEQCKMMALSSI

SEQ ID NO: 5143 - protein, 1063 aa, Arabidopsis thaliana
MTTEDDDQMLGPSGTQEKIYVSVRMRPLNDKEKFRNDVPDWECINNTTIIYRSHLSISERSMYPSAYTFDRVFSPECCTRQVYEQGAKEVAFSVVSGVNASVFAYGQTSSGKTYTMSGITDCALVDIYGYIDKHKEREFILKFSAMEIYNESVRDLLSTDTSPLRLLDDPEKGTVVEKLTEETLRDWNHFKELLSVCKAQRQIGETALNEVSSRSHQILRLTVESIAREFSTNDKFSTLTATVNFIDLAGSERASQSLSAGTRLKEGCHINRSLLTLGTVIRKLSKEKTGHIPFRDSKLTRILQSSLGGNARTAIICTMSPARIHVEQSRNTLLFASCAKEVTTNAQVNVVMSDKALVKHLQRELAKLESELRSPSQASIVSDTTALLTEKDLEVEKLKKEVFQLAQQLEQARSEIKDLRRMVEEEKNQEKETLSTETEGLNVLMEHQYPKLRVRRTWDSENTTPLSPISAHRSSISPRSTEYSYEENVFQLSDFRIDSASSSPQQLAFVTPFLKVPLDDIHVTDTVDQSHVHKEEAIEEPHVQEERFYEMAEHTDGNSEDNCREVRCIETEKSDISIGPVENMPESSPDKYEAVTAEEPVSVTEPKNLQHPTEEAVCVTETKNLQHPTEAENEEEEEEERVKEVSGASPEPKQESNLTKNPALCDLECSPDEFDTSMSNLSRISTPPALITPSPEKPFSWIMERDSQLFRGMKLTRSRSCRPSLLSSPSSSWLEKDADTPPSWYDKEFIKTAERNLTMCDIKNQRLLQDEFSGRSMPTTWFERSLSDTQTVDAASHGVSNEMSPNESPFRPSDASVFELQTSGRASISQDRTEETAAQKDKQIIHRSMEEREQKFLASNSTKSFKDAAMDPIQDYLDTALNWPVEFKRLQREIIELWHVCKVSMAHRSYFFLLFRGDQKDCLYLEVELRRLKYIRESFAQNSNDGNNMTLISCTRALTRERYKLSKLMQRKLSKEERENLFLRWGIGLNTNHRRVQLARRLWSDYKDMGHVRESASLVGKLNGFVDMKLTSTEMFGVNYAFRPPRPKKSSLWKRSVLSLSFL

SEQ ID NO: 5144 - protein, 754 aa, Arabidopsis thaliana
MKGETYRVFCVGTADTKLDELRFLAGSVRSNIGAFSKNSSSKVEVVIVDVSAGADQKQIDNVADFAFVTREEVLSCYIGSNQEEKPVKLPDDRGEAVGVMSKCLENFLRQAFEDNSLAGAIGLGGSGGTSLISSAFRSLPIGIPKVIVSTVASGQTEPYVGTSDLVLIPSLVDVCGINSVSRVVFSNAGASFAGMVVGRLELFRSSPSDNGKCTVGITMFGVTTPCVNAVQEILTREGYETLVFHATGVGGRAMESLVKEGFIQGVMDITTTEVADHLVGGVMACDSSRFDITIEKGIPLVLSVGALDMVNFGGKDTIPSHFQTRKIHVHNEQVSLIRTTAEENKKFARFIADKLNKSTSKVRVCIPEKGLSALDAPGKPFCDPEATGALINELQGLIQTNDDRQVNIYSHHINDPEFAEALVASFLEICPKTYAQIKPSETTSTKPSTGEHDDGHVRSRLERIPYSPKEFPNAKPETLERTQAILGRLRDQIEKGIPIIGGGAGTGISAKFEEAGGIDLIVIYNSGRFRMAGRGSLAGLLPFADANAVVLEMANEVLPVVKAVPVLAGVCATDPFRRMDYFLKQLESIGFVGVQNFPTVGLFDGNFRQNLEETGMGYGLEVKMISEAHKMGLLTTPYAFNPKEGEEMAKAGADIIVAHMGLTTSGNIGAKTAVSVEESVVRVQAIADAARRFNPDIIVLCHGGPISGPEEAEFVLKRTQGCVHGFYGASSMERLPVEQAITNTVQKYKSISIK

SEQ ID NO: 5145 - protein, 614 aa, Arabidopsis thaliana
MGFGVGGGGGRMLDLRIVQNHKRSKSASFPEKKRVEGDKTSNSSHEASQRMKLDMGRSNESKHNQYHSNTETSLKQEITHLETRLQDQFKVRCALEKALGYRTASSYVLTETNDIAMPKPATDLIKDVAVLEMEVIHLEQYLLSLYRKAFEQQISSVSPNLENKKPKSPPVTTPRRRLDFSEDDDTPSKTDQHTVPLLDDNQNQSKKTEIAAVDRDQMDPSFRRSHSQRSAFGSRKASPEDSWGKASRSCHSQPLYVQNGDNLISLAEHLGTRISDHVPETPNKLSEGMVKCMSEIYCKLAEPPSVLHRGLSSPNSSLSSSAFSPSDQYDTSSPGFGNSSSFDVRLDNSFHVEGEKDFSGPYSSIVEVLCIYRDAKKASEVEDLLQNFKSLISRLEEVDPRKLKHEEKLAFWINVHNALVMHAFLAYGIPQNNVKRVLLLLKAAYNIGGHTISAEAIQSSILGCKMSHPGQWLRLLFASRKFKAGDERLAYAIDHPEPLLHFALTSGSHSDPAVRVYTPKRIQQELETSKEEYIRMNLSIRKQRILLPKLVETFAKDSGLCPAGLTEMVNRSIPESSRKCVKRCQSSTSKPRKTIDWIPHSFTFRYLILREAAK

SEQ ID NO: 5146 - protein, 500 aa, Arabidopsis thaliana
MPVDLDNSSTVSGDASVSSTGNQNLTPKSVGKKKRNLPGMPDPDAEVIALSPKTLMATNRFVCEICNKGFQRDQNLQLHRRGHNLPWKLRQRSTKEVRKKVYVCPVSGCVHHDPSRALGDLTGIKKHFCRKHGEKKWKCEKCSKKYAVQSDWKAHSKICGTKEYKCDCGTLFSRRDSFITHRAFCDALAEESAKNHTQSKKLYPETVTRKNPEIEQKSPAAVESSPSLPPSSPPSVAIAPAPAISVETESVKIISSSVLPIQNSPESQENNNHPEVIIEEASRTIGFNVSSSDLSNDHSNNNGGYAGLFVSSTASPSLYASSTASPSLFAPSSSMEPISLCLSTNPSLFGPTIRDPPHFLTPLPPQPAMSATALLQKAAQMGSTGSGGSLLRGLGIVSTTSSSMELSNHDALSLAPGLGLGLPCSSGGSGSGLKELMMGNSSVFGPKQTTLDFLGLGRAVGNGGNTGGGLSALLTSIGGGGGIDLFGSGEFSGKDIGRSS

SEQ ID NO: 5147 - protein, 579 aa, Arabidopsis thaliana
MKFMKLGSKPDSFQSDEDCVRYVATELATDVVVIVGDVKFHLHKFPLLSKSARLQKLIATTTTDEQSDDDEIRIPDIPGGPPAFEICAKFCYGMAVTLNAYNVVAVRCAAEYLEMYESIENGNLVYKMEVFLNSSVLRSWKDSIIVLQTTRSFYPWSEDVKLDVRCLESIALKAAMDPARVDWSYTYNRRKLLPPEMNNNSVPRDWWVEDLAELSIDLFKRVVSTIRRKGGVLPEVIGEALEVYAAKRIPGFMIQNDDNDDEEDVMEQRSLLETLVSMLPSEKQSVSCGFLIKLLKSSVSFECGEEERKELSRRIGEKLEEANVGDLLIRAPEGGETVYDIDIVETLIDEFVTQTEKRDELDCSDDINDSSKANVAKLIDGYLAEISRIETNLSTTKFITIAEKVSTFPRQSHDGVYRAIDMFLKQHPGITKSEKKSSSKLMDCRKLSPEACAHAVQNERLPLRVVVQILFFEQVRATTKPSLPPSGSHGSSRTTTEEECESVTATEETTTTTRDKTSSSEKTKAKGVVMSRIFSKLWTGKDKDGVGDVSSSDTSESPGSVTTVGDKSTPSTRRRRSSS

SEQ ID NO: 5148 - protein, 82 aa, Arabidopsis thaliana
MYHQEQHPVGAPPPQGYPPKDGYPPAGYPPAGYPPPGYAQGYPAQGYPPPQYSQAPQQKQNAGMLEGCLAALCCCCLLDACF

SEQ ID NO: 5149 - protein, 182 aa, Arabidopsis thaliana
MGNCQAAEAATVLIHHPAENKVERIYWSVTASDIMKSNPGHYVAVVVTSPTMKNEKGLPLKQLKLLRPDDTLLIGHVYRLVSFEEVLNEFATKKCVKLGKLLKEGGGLDLTKKKTKHRKKKLDQETGKVNPNSDPNPNQDGADNAVAGENGGDGFMRRSHGGGRGGGGWRPALHSIPEFGSS

SEQ ID NO: 5150 - protein, 385 aa, Arabidopsis thaliana
MRRIFLFDENSLNSSSTIDTSSASTIDTSFASQCTNFSSGQASGTQDTHAGIFEDCPGLNPNDERVVELQCEIREKCEALTQDPEMGLILGEALHAESDNVPFLQSIADDLTQNGVSGEAFQEALNIVGQAAASPLDQFEIVPLIPMHIGNFYFSFTNPSLFMLLTLSFFLLLIHFVTKKGGGNLVPNAWQSLVELLYDFVLNLVKEQIGGLSGNVKQMFFPCILVTFLFLLFCNLQGMIPYSFTVTSHFLITLALSFSIFIGITIVGFQRHGLHFFSFLLPAGVPLPLAPFLVLLELISYCFRALSLGIRLFANMMAGHSLVKILSGFAWTMLCMNDIFYFIGALGPLFIVLALTGLELGVAILQAYVFTILICIYLNDAINLH

SEQ ID NO: 5151 - protein, 265 aa, Arabidopsis thaliana
MIESQRHSYHLVDPSPWPISGSLGALATTVGGVMYMHPFQGGARLLSLGLIFILYTMFVWWRDVLRESTLEGHHTKVVQLGPRYGSILFIVSEVMFFFAFFWASSHSSLAPAVEIGGIWPPKGIEVLDPWEIPFLNTPILPSSGAAVTWAHHAILAGKEKRAVYALVATVLLALVFTGFQGMEYYQAPFTISDSIYGSTFFLATGFHGFHVIIGTLFLIICGIRQYLGHLTKEHHVGFEAAAWYWHFVDVVWLFLFVSIYWWGGI

SEQ ID NO: 5152 - protein, 196 aa, Arabidopsis thaliana
METATEVATVVSTPAVTVAAVATRKRDKPYKGIRMRKWGKWVAEIREPNKRSRIWLGSYSTPEAAARAYDTAVFYLRGPSARLNFPELLAGVTVTGGGGGGVNGGGDMSAAYIRRKAAEVGAQVDALEAAGAGGNRHHHHHQHQRGNHDYVDNHSDYRINDDLMECSSKEGFKRCNGSLERVDLNKLPDPETSDDD

SEQ ID NO: 5153 - protein, 176 aa, Arabidopsis thaliana
METEAAVTATVTAATMGIGTRKRDLKPYKGIRMRKWGKWVAEIREPNKRSRIWLGSYATPEAAARAYDTAVFYLRGPSARLNFPELLAGLTVSNGGGRGGDLSAAYIRRKAAEVGAQVDALGATVVVNTGGENRGDYEKIENCRKSGNGSLERVDLNKLPDPENSDGDDDECVKRR

SEQ ID NO: 5154 - protein, 184 aa, Arabidopsis thaliana
MEGGGVADVAVPGTRKRDRPYKGIRMRKWGKWVAEIREPNKRSRLWLGSYSTPEAAARAYDTAVFYLRGPTARLNFPELLPGEKFSDEDMSAATIRKKATEVGAQVDALGTAVQNNRHRVFGQNRDSDVDNKNFHRNYQNGEREEEEEDEDDKRLRSGGRLLDRVDLNKLPDPESSDEEWESKH

SEQ ID NO: 5155 - protein, 153 aa, Arabidopsis thaliana
MDAGVAVKADVAVKMKRERPFKGIRMRKWGKWVAEIREPNKRSRLWLGSYSTPEAAARAYDTAVFYLRGPTATLNFPELLPCTSAEDMSAATIRKKATEVGAQVDAIGATVVQNNKRRRVFSQKRDFGGGLLELVDLNKLPDPENLDDDLVGK

SEQ ID NO: 5156 - DNA, 276 bp, Beta vulgaris
  source 1..276: mol_type = genomic DNA
tcaaatccacaaaaaaaatttgtggctcatattcattctcaaaaactcttggtttctcttgctttcaatttgacatctcccctccaaaaaaaaaaaaaaaaaaaaaacaaaaagtttggcctccttgttcatcttcttccttcttcttcttccttcctctgtatgtgctgtcttctcacaccaaactctgtgtttttctctctttctctctcctacctaaatttcaccttctattttctctctcctcttttcttcttctatcacttatctctttaa

SEQ ID NO: 5157 - DNA, 111 bp, Beta vulgaris
  source 1..111: mol_type = genomic DNA
tagattttaattttattcattttttcctcaaatcaatggggtaaaagattatcttcatcttctatggcgtcttcaacaggtaaattaaatctccatttttttgaatcttga

SEQ ID NO: 5158 - DNA, 90 bp, Beta vulgaris
  source 1..90: mol_type = genomic DNA
tgatttgattttgattttgattttgattttgttgttgtttggattatgcaggtgtgcaaagacgcgattattccggtgagaattttgtga

SEQ ID NO: 5159 - DNA, 87 bp, Beta vulgaris
  source 1..87: mol_type = genomic DNA
acttgtgattgtaaggaaaataaaattaaggagatgaaaatgggagaaaaaggaagtttatttgtttatactgtgaattatgtttga

SEQ ID NO: 5160 - DNA, 78 bp, Beta vulgaris
  source 1..78: mol_type = genomic DNA
tagtatattacttacccaggtgttcagctgagtgtgtttcatataactactgtgtgggaagatgacaggaggttttga

SEQ ID NO: 5161 - DNA, 69 bp, Beta vulgaris
  source 1..69: mol_type = genomic DNA
gtatcaattggttgttgtgagataggatccgaaagcggcggtataccgcttgttgttgtccgttgttaa

SEQ ID NO: 5162 - DNA, 73 bp, Beta vulgaris
  source 1..73: mol_type = genomic DNA
tcaaatccacaaaaaaaatttgtggctcatattcattctcaaaaactcttggtttctcttgctttcaatttga

SEQ ID NO: 5163 - DNA, 147 bp, Beta vulgaris
  source 1..147: mol_type = genomic DNA
catctcccctccaaaaaaaaaaaaaaaaaaaaaacaaaaagtttggcctccttgttcatcttcttccttcttcttcttccttcctctgtatgtgctgtcttctcacaccaaactctgtgtttttctctctttctctctcctacctaa

SEQ ID NO: 5164 - DNA, 69 bp, Beta vulgaris
  source 1..69: mol_type = genomic DNA
atttcaccttctattttctctctcctcttttcttcttctatcacttatctctttaatctcactatatag

SEQ ID NO: 5165 - DNA, 69 bp, Beta vulgaris
  source 1..69: mol_type = genomic DNA
tctttctcctataagttttttccaactaaattcaatcatttttattcattcttttatcatagattttaa

SEQ ID NO: 5166 - DNA, 78 bp, Beta vulgaris
  source 1..78: mol_type = genomic DNA
ttttattcattttttcctcaaatcaatggggtaaaagattatcttcatcttctatggcgtcttcaacaggtaaattaa

SEQ ID NO: 5167 - DNA, 114 bp, Beta vulgaris
  source 1..114: mol_type = genomic DNA
atctccatttttttgaatcttgaggttttaaagtttgatttgattttgattttgattttgattttgttgttgtttggattatgcaggtgtgcaaagacgcgattattccggtga

SEQ ID NO: 5168 - DNA, 144 bp, Beta vulgaris
  source 1..144: mol_type = genomic DNA
tgaattatgtttgattttgttttaagaatttgtaatttaaattggtatagagaaaggcggattatctttgaatatagttgttgtttttttggtacttggttgtgtttgtgcagtagtatattacttacccaggtgttcagctga

SEQ ID NO: 5169 - DNA, 60 bp, Beta vulgaris
  source 1..60: mol_type = genomic DNA
taactactgtgtgggaagatgacaggaggttttgagtatcaattggttgttgtgagatag

SEQ ID NO: 5170 - DNA, 85 bp, Beta vulgaris
  source 1..85: mol_type = genomic DNA
gatccgaaagcggcggtataccgcttgttgttgtccgttgttaaatggacaattattcttctggtgaagaaccaattgttaaggt

SEQ ID NO: 5171 - DNA, 392 bp, Beta vulgaris
  source 1..392: mol_type = genomic DNA
tcaaatccacaaaaaaaatttgtggctcatattcattctcaaaaactcttggtttctcttgctttcaatttgacatctcccctccaaaaaaaaaaaaaaaaaaaaaacaaaaagtttggcctccttgttcatcttcttccttcttcttcttccttcctctgtatgtgctgtcttctcacaccaaactctgtgtttttctctctttctctctcctacctaaatttcaccttctattttctctctcctcttttcttcttctatcacttatctctttaatctcactatatagtctttctcctataagttttttccaactaaattcaatcatttttattcattcttttatcatagattttaattttattcattttttcctcaaatcaatggggtaa

SEQ ID NO: 5172 - DNA, 75 bp, Beta vulgaris
  source 1..75: mol_type = genomic DNA
tgattttgttgttgtttggattatgcaggtgtgcaaagacgcgattattccggtgagaattttgtgaacttgtga

SEQ ID NO: 5173 - DNA, 72 bp, Beta vulgaris
  source 1..72: mol_type = genomic DNA
taaggagatgaaaatgggagaaaaaggaagtttatttgtttatactgtgaattatgtttgattttgttttaa

SEQ ID NO: 5174 - DNA, 141 bp, Beta vulgaris
  source 1..141: mol_type = genomic DNA
taaattggtatagagaaaggcggattatctttgaatatagttgttgtttttttggtacttggttgtgtttgtgcagtagtatattacttacccaggtgttcagctgagtgtgtttcatataactactgtgtgggaagatga

SEQ ID NO: 5175 - DNA, 75 bp, Beta vulgaris
  source 1..75: mol_type = genomic DNA
tgagataggatccgaaagcggcggtataccgcttgttgttgtccgttgttaaatggacaattattcttctggtga

SEQ ID NO: 5176 - DNA, 135 bp, Eucalyptus grandis
  source 1..135: mol_type = genomic DNA
aaaactcgaagctgggacgaggaggagctgctggctgtttgcttcttcttccgcttccgcttctgcttctgcttcggctgcttcctcctcctccacttcttcttcttcccaccgaaatattatattgtccggtga

SEQ ID NO: 5177 - DNA, 132 bp, Eucalyptus grandis
  source 1..132: mol_type = genomic DNA
tggcttgatcagaatcgtttcacacacacacacacacttgttcctctctccccacagcggcctcgcgtcgatcgtcagcttcggtggagcggcgttggagcggcgttgctgctggtgctgctgctggcctga

SEQ ID NO: 5178 - DNA, 201 bp, Eucalyptus grandis
  source 1..201: mol_type = genomic DNA
cgacatggtctgatctccgatcctttcgtactagctcttcttcccccccgcgccttcctcgccgcggcggcggcggcggcggcggcggcggcttcgtttcgcctctcgttcgatctccgttgtcgccatgtccgaagaaccgagagaaggtccctattttgcccgttgctgctgatcagtgaggatttgaagcggcgctag

SEQ ID NO: 5179 - DNA, 63 bp, Eucalyptus grandis
  source 1..63: mol_type = genomic DNA
tgaaggaaagctttgttattgcatgcttattttcggtggtatctattctcgtttctctgttaa

SEQ ID NO: 5180 - DNA, 166 bp, Eucalyptus grandis
  source 1..166: mol_type = genomic DNA
tgagtctatttccacgtagttcctatattgaacttgaactcacgcaactgcattcgaaactttttctgcacagaacttcataaggatcactctgtacgactctctgaactctttgctgcaatgatgttcttcctatgtcacatgtcagaattgtttcttcttgcga

SEQ ID NO: 5181 - DNA, 280 bp, Eucalyptus grandis
  source 1..280: mol_type = genomic DNA
aaaactcgaagctgggacgaggaggagctgctggctgtttgcttcttcttccgcttccgcttctgcttctgcttcggctgcttcctcctcctccacttcttcttcttcccaccgaaatattatattgtccggtgatggcttgatcagaatcgtttcacacacacacacacacttgttcctctctccccacagcggcctcgcgtcgatcgtcagcttcggtggagcggcgttggagcggcgttgctgctggtgctgctgctggcctgacgacatggtctga

SEQ ID NO: 5182 - DNA, 144 bp, Eucalyptus grandis
  source 1..144: mol_type = genomic DNA
tagctcttcttcccccccgcgccttcctcgccgcggcggcggcggcggcggcggcggcggcttcgtttcgcctctcgttcgatctccgttgtcgccatgtccgaagaaccgagagaaggtccctattttgcccgttgctgctga

SEQ ID NO: 5183 - DNA, 156 bp, Eucalyptus grandis
  source 1..156: mol_type = genomic DNA
tgaggtccggtccattccataatgcatgcattcaatgaaggaaagctttgttattgcatgcttattttcggtggtatctattctcgtttctctgttaatttgcagctcacgaaacttgtcgtattacgtgtgtgtactgagtctatttccacgtag

SEQ ID NO: 5184 - DNA, 90 bp, Eucalyptus grandis
  source 1..90: mol_type = genomic DNA
tgaactcacgcaactgcattcgaaactttttctgcacagaacttcataaggatcactctgtacgactctctgaactctttgctgcaatga

SEQ ID NO: 5185 - DNA, 143 bp, Eucalyptus grandis
  source 1..143: mol_type = genomic DNA
aaaactcgaagctgggacgaggaggagctgctggctgtttgcttcttcttccgcttccgcttctgcttctgcttcggctgcttcctcctcctccacttcttcttcttcccaccgaaatattatattgtccggtgatggcttga

SEQ ID NO: 5186 - DNA, 306 bp, Eucalyptus grandis
  source 1..306: mol_type = genomic DNA
tcagaatcgtttcacacacacacacacacttgttcctctctccccacagcggcctcgcgtcgatcgtcagcttcggtggagcggcgttggagcggcgttgctgctggtgctgctgctggcctgacgacatggtctgatctccgatcctttcgtactagctcttcttcccccccgcgccttcctcgccgcggcggcggcggcggcggcggcggcggcttcgtttcgcctctcgttcgatctccgttgtcgccatgtccgaagaaccgagagaaggtccctattttgcccgttgctgctgatcagtga

SEQ ID NO: 5187 - DNA, 201 bp, Eucalyptus grandis
  source 1..201: mol_type = genomic DNA
taatgcatgcattcaatgaaggaaagctttgttattgcatgcttattttcggtggtatctattctcgtttctctgttaatttgcagctcacgaaacttgtcgtattacgtgtgtgtactgagtctatttccacgtagttcctatattgaacttgaactcacgcaactgcattcgaaactttttctgcacagaacttcataa

SEQ ID NO: 5188 - DNA, 62 bp, Eucalyptus grandis
  source 1..62: mol_type = genomic DNA
tgaactctttgctgcaatgatgttcttcctatgtcacatgtcagaattgtttcttcttgcga

SEQ ID NO: 5189 - DNA, 162 bp, Brassica oleracea
  source 1..162: mol_type = genomic DNA
taagtaaaaccgaaaaaaaggaaggaaaaaaatgttgtggctgagattgattctggctttcttcttcttacagtcttcttcaccctaaaacagtcttccttccttccttcacttatcttcttccttcttctctatctcttctccagctctgctaaaacataa

SEQ ID NO: 5190 - DNA, 51 bp, Brassica oleracea
  source 1..51: mol_type = genomic DNA
aagtatagttttttttttctttccgatttgattgtttctctggtgagatga

SEQ ID NO: 5191 - DNA, 72 bp, Brassica oleracea
  source 1..72: mol_type = genomic DNA
tctagtttctattttcggattgttcctcaaatgatggctactctcaagggtatgtttaatttacattattag

SEQ ID NO: 5192 - DNA, 69 bp, Brassica oleracea
  source 1..69: mol_type = genomic DNA
taaaaaggttttggatgcgatggattcatttgggtgagacttttgagaagtaaaaggggattcttttga

SEQ ID NO: 5193 - DNA, 87 bp, Brassica oleracea
  source 1..87: mol_type = genomic DNA
gttctgctactctgtttcacacggtggacttttcaaagatttctcctttcatttctaaatctctctctctctttttctttttactaa

SEQ ID NO: 5194 - DNA, 78 bp, Brassica oleracea
  source 1..78: mol_type = genomic DNA
taaaatatttctcatagtctctttctcttttttttttgcagttgctttagaatcttaaagaggttacttttcagttag

SEQ ID NO: 5195 - DNA, 63 bp, Brassica oleracea
  source 1..63: mol_type = genomic DNA
aatcattcacaacagggctttgctatttggaggggatcaaagatggtttctttgttacactag

SEQ ID NO: 5196 - DNA, 69 bp, Brassica oleracea
  source 1..69: mol_type = genomic DNA
taagatccggttctgatggatacaaatacatccggagatgagttattaaccaaggtattttggtgctta

SEQ ID NO: 5197 - DNA, 84 bp, Brassica oleracea
  source 1..84: mol_type = genomic DNA
taaaaccgaaaaaaaggaaggaaaaaaatgttgtggctgagattgattctggctttcttcttcttacagtcttcttcaccctaa

SEQ ID NO: 5198 - DNA, 105 bp, Brassica oleracea
  source 1..105: mol_type = genomic DNA
aacagtcttccttccttccttcacttatcttcttccttcttctctatctcttctccagctctgctaaaacataaaagtatagttttttttttctttccgatttga

SEQ ID NO: 5199 - DNA, 51 bp, Brassica oleracea
  source 1..51: mol_type = genomic DNA
tgatggctactctcaagggtatgtttaatttacattattagcaatttataa

SEQ ID NO: 5200 - DNA, 84 bp, Brassica oleracea
  source 1..84: mol_type = genomic DNA
tgagaagtaaaaggggattcttttgagttctgctactctgtttcacacggtggacttttcaaagatttctcctttcatttctaa

SEQ ID NO: 5201 - DNA, 108 bp, Brassica oleracea
  source 1..108: mol_type = genomic DNA
atctctctctctctttttctttttactaatatgatctttggtggtgtggataaaatatttctcatagtctctttctcttttttttttgcagttgctttagaatcttaa

SEQ ID NO: 5202 - DNA, 129 bp, Brassica oleracea
  source 1..129: mol_type = genomic DNA
agaggttacttttcagttagaatcattcacaacagggctttgctatttggaggggatcaaagatggtttctttgttacactagagagggatttgaagcagcggagaaagctgctaagatccggttctga

SEQ ID NO: 5203 - DNA, 53 bp, Brassica oleracea
  source 1..53: mol_type = genomic DNA
ataaaaaaataagtaaaaccgaaaaaaaggaaggaaaaaaatgttgtggctga

SEQ ID NO: 5204 - DNA, 108 bp, Brassica oleracea
  source 1..108: mol_type = genomic DNA
tgattctggctttcttcttcttacagtcttcttcaccctaaaacagtcttccttccttccttcacttatcttcttccttcttctctatctcttctccagctctgctaa

SEQ ID NO: 5205 - DNA, 51 bp, Brassica oleracea
  source 1..51: mol_type = genomic DNA
tagttttttttttctttccgatttgattgtttctctggtgagatgatctag

SEQ ID NO: 5206 - DNA, 54 bp, Brassica oleracea
  source 1..54: mol_type = genomic DNA
tttctattttcggattgttcctcaaatgatggctactctcaagggtatgtttaa

SEQ ID NO: 5207 - DNA, 63 bp, Brassica oleracea
  source 1..63: mol_type = genomic DNA
tttacattattagcaatttataaggttgcatctgaaaatcactgttttgtagctcagaaatag

SEQ ID NO: 5208 - DNA, 75 bp, Brassica oleracea
  source 1..75: mol_type = genomic DNA
tgaggggtttgtgatggttttttaaaaaggttttggatgcgatggattcatttgggtgagacttttgagaagtaa

SEQ ID NO: 5209 - DNA, 108 bp, Brassica oleracea
  source 1..108: mol_type = genomic DNA
aaggggattcttttgagttctgctactctgtttcacacggtggacttttcaaagatttctcctttcatttctaaatctctctctctctttttctttttactaatatga

SEQ ID NO: 5210 - DNA, 165 bp, Brassica oleracea
  source 1..165: mol_type = genomic DNA
tagaatcttaaagaggttacttttcagttagaatcattcacaacagggctttgctatttggaggggatcaaagatggtttctttgttacactagagagggatttgaagcagcggagaaagctgctaagatccggttctgatggatacaaatacatccggagatga

SEQ ID NO: 5211 - DNA, 60 bp, Amaranthus hybridus
  source 1..60: mol_type = genomic DNA
taaaagtgggatggaaactttcctaaaatggaaagtattctaaagtggaaaaacttatag

SEQ ID NO: 5212 - DNA, 60 bp, Amaranthus hybridus
  source 1..60: mol_type = genomic DNA
taaggtggaaaaacaaaaagaaacgaagggagtaattgttattttctctggttattttag

SEQ ID NO: 5213 - DNA, 63 bp, Amaranthus hybridus
  source 1..63: mol_type = genomic DNA
tatatgtctttttgggtacgacccaaatatattgtgcaaattcatttggaacaaaacttttag

SEQ ID NO: 5214 - DNA, 141 bp, Amaranthus hybridus
  source 1..141: mol_type = genomic DNA
taatctagctgttcttgtttgtggacatgccgtccattaatcccccacaaatttatatcaattcaaaagcaacaaatatttaaggcccctctcttacatccacccatgtcggtgatatcttattattcttcccacccataa

SEQ ID NO: 5215 - DNA, 90 bp, Amaranthus hybridus
  source 1..90: mol_type = genomic DNA
ttctttcttcttttcttttttcttttttatatatatctcacttccgacttttcccatataaatataaataaccctattttatttccctaa

SEQ ID NO: 5216 - DNA, 150 bp, Amaranthus hybridus
  source 1..150: mol_type = genomic DNA
cacaatccccaaaaaacccagaattcctccctctttctctctcctctcttctctcacaaaacccattttctctctacttcacaaaacccttttttttttttcagttttccgccatggaaacagggtcaacgaaaaagagtgtcagagtag

SEQ ID NO: 5217 - DNA, 72 bp, Amaranthus hybridus
  source 1..72: mol_type = genomic DNA
tgaagtaaggaaagtggagatttaaggggtaaaagtgggatggaaactttcctaaaatggaaagtattctaa

SEQ ID NO: 5218 - DNA, 243 bp, Amaranthus hybridus
  source 1..243: mol_type = genomic DNA
agtggaaaaacttatagaactacccgttttagtaaggtggaaaaacaaaaagaaacgaagggagtaattgttattttctctggttattttagtatatgtctttttgggtacgacccaaatatattgtgcaaattcatttggaacaaaacttttagtaattttaaatataaaataaacttaattattaaaagaaagaagtgtagtgtagataaaatcgataagttgttaaagagtactccataa

SEQ ID NO: 5219 - DNA, 60 bp, Amaranthus hybridus
  source 1..60: mol_type = genomic DNA
tgagaggataagctaaaagctaatctagctgttcttgtttgtggacatgccgtccattaa

SEQ ID NO: 5220 - DNA, 75 bp, Amaranthus hybridus
  source 1..75: mol_type = genomic DNA
tcccccacaaatttatatcaattcaaaagcaacaaatatttaaggcccctctcttacatccacccatgtcggtga

SEQ ID NO: 5221 - DNA, 87 bp, Amaranthus hybridus
  source 1..87: mol_type = genomic DNA
tatcttattattcttcccacccataattctttcttcttttcttttttcttttttatatatatctcacttccgacttttcccatataa

SEQ ID NO: 5222 - DNA, 200 bp, Amaranthus hybridus
  source 1..200: mol_type = genomic DNA
taaataaccctattttatttccctaacacaatccccaaaaaacccagaattcctccctctttctctctcctctcttctctcacaaaacccattttctctctacttcacaaaacccttttttttttttcagttttccgccatggaaacagggtcaacgaaaaagagtgtcagagtagagaagccatacaaaggtataagga

SEQ ID NO: 5223 - DNA, 87 bp, Amaranthus hybridus
  source 1..87: mol_type = genomic DNA
taaaatggaaagtattctaaagtggaaaaacttatagaactacccgttttagtaaggtggaaaaacaaaaagaaacgaagggagtaa

SEQ ID NO: 5224 - DNA, 108 bp, Amaranthus hybridus
  source 1..108: mol_type = genomic DNA
ttgttattttctctggttattttagtatatgtctttttgggtacgacccaaatatattgtgcaaattcatttggaacaaaacttttagtaattttaaatataaaataa

SEQ ID NO: 5225 - DNA, 78 bp, Amaranthus hybridus
  source 1..78: mol_type = genomic DNA
tagctgttcttgtttgtggacatgccgtccattaatcccccacaaatttatatcaattcaaaagcaacaaatatttaa

SEQ ID NO: 5226 - DNA, 129 bp, Amaranthus hybridus
  source 1..129: mol_type = genomic DNA
ggcccctctcttacatccacccatgtcggtgatatcttattattcttcccacccataattctttcttcttttcttttttcttttttatatatatctcacttccgacttttcccatataaatataaataa

SEQ ID NO: 5227 - DNA, 193 bp, Amaranthus hybridus
  source 1..193: mol_type = genomic DNA
ccctattttatttccctaacacaatccccaaaaaacccagaattcctccctctttctctctcctctcttctctcacaaaacccattttctctctacttcacaaaacccttttttttttttcagttttccgccatggaaacagggtcaacgaaaaagagtgtcagagtagagaagccatacaaaggtataagga
